United States Patent Application Publication US 2004/0005561 A1 - sequence listing, part 2

SEQ ID NO: 8523 - DNA, 568 bp, Homo sapiens
  misc_feature (1)...(568): n = g, a, c or t
agctagacnaagttggtcatgatgcagaagctactcaaatgcagtcggcttgtcctggctcttgccctcatcctggttctggaatcctcagttcaaggttatcctacgcagagagccaggtaccaatgggtgcgctgcaatccagacagtaattctgcaaactgccttgaagaaaaaggaccaatgttcgaactacttccaggtgaatccaacaagatcccccgtctgaggactgacctttttccaaagacgagaatccaggacttgaatcgtatcttcccactttctgaggactactctggatcaggcttcggctccggctccggctctggatcaggatctgggagtggcttcctaacggaaatggaacaggattaccaactagtagacgaaagtgatgctttccatgacaaccttaggtctcttgacaggaatctgccctcagacagccaggacttgggtcaacatggattagaagaggattttatgttataaaagaggattttcccaccttgacaccaggcaatgtagttagcatattttatgtaccatggttatatgattaatc

SEQ ID NO: 8524 - DNA, 591 bp, Homo sapiens
  misc_feature (1)...(591): n = g, a, c or t
gttcaatnaagacagngtggctaggaaatccctggaaggactcccaccactaagacttgtcaaaaattcttcaaacagtacttgcagaggccctgaaatttctgggacttctataaaatccctccctgggcttgaaaaaataattttgaatttgggcagtctagagccttagagagctaagagctgatagtagctctatcagagtaaactcaaaaacaaacacacggggggtctctagggctctctggctggtggcttcatgggtacataagcctgtctttccaccaaggaatctggcttgggatgcttattcatatttgaatcacgaaagcccaccatttaaataatatttggtaaagatcttttaggttaattagatcttacatatacttttgcaaaagctacctctggatcatttctagtattactagcatttcagatattgnttataactatcacccttgtagatattacactaaattaaaacaatagtgatacaaattcccaccttaccaaaatagcaataatccaatttatttcctagtttatttaatcagattctcctaccaaccatctcctcttctatttttt

SEQ ID NO: 8525 - DNA, 581 bp, Homo sapiens
  misc_feature (1)...(581): n = g, a, c or t
cctgaatttnaaccttcactggaggttttactatgatcctnctgagttccagaccattattattggagataataaaactcagtaccacatggggtatttcagggattctcctgatgaatttcctgtatatgttggtataaatgaagcaaagaaaaattgtataattgttccaaatggagataatgtatttgctgcagtcaaattatttttgacgaaaaaacttaaagaaataacggataaaaagaaaatcaatctcttgaaaaacatanatgaaaaactcacagaagcagccagagaattggggtactcgcttgaacagagaaccgtgaagatgaaacagagagataagaaagttgtgacaaagacctttcatggtgcaggcttggttgttccagtagataaaaatgatgttgggtaccgagagctccctgaaacagatgctgacctcaagagaatttgcaagacaatagttgaggctgcaagtgatgangagagactaaaagcttttgctcccattcaggaaatgatgacttttgtgcagtttgctaatgatgaatgtgattatggcatggggcttgaat

SEQ ID NO: 8526 - DNA, 549 bp, Homo sapiens
  misc_feature (1)...(549): n = g, a, c or t
ctagactnanttggtcatgatgcagaagctactcaaatgcagtcggcttgtcctggctcttgccctcatcctggttctggaatcctcagttcaaggttatcctacgcagagagccaggtaccaatgggtgcgctgcaatccagacagtaattctgcaaactgccttgaagaaaaaggaccaatgttcgaactacttccaggtgaatccaacaagatcccccgtctgaggactgacctttttccaaagacgagaatccaggacttgaatcgtatcttcccactttctgaggactactctggatcaggcttcggctccggctccggctctggatcaggatctgggagtggcttcctaacggaaatggaacaggattaccaactagtagacgaaagtgatgctttccatgacaaccttaggtctcttgacaggaatctgccctcagacagccaggacttgggtcaacatggattagaagaggatnttatgttataaaagaggattttcccaccttgacaccaggcaatgtagttagcatattttatgtacca

SEQ ID NO: 8527 - DNA, 542 bp, Homo sapiens
ccactgcactgaaaaaattgaaaagtcttggtttaattcatgctgatctcaagccagagaatattatgttggtggatcctgttcggcagccttacagggttaaagtaatagactttgggtcggccagtcatgtatcaaagactgtttgttcaacatatctacaatctcggtactacagagctccagagattatattggggttgccattttgtgaagccatagacatgtggtcattgggatgtgtgattgcagaattatttcttggatggccgctctacccaggagccttggagtatgatcagattcgatacatttctcagactcaaggtttgccaggagaacagttgttaaatgtgggtactaaatccacaagatttttttgcaaagaaacagatatgtctcattctggttggagattaaagacattggaagagcatgaggcagagacaggaatgaagtctaaagaagccagaaaatacattttcaacagtctggatgatgtagcgcatgtgaacacagtgatggatttggaaggaagtgat

SEQ ID NO: 8528 - DNA, 505 bp, Homo sapiens
  misc_feature (1)...(505): n = g, a, c or t
ttctaatngtataaaaatnggaaatttgaaatagntctgtaaaagaaaaaaatgtaaaaatacatcngctttctctcatggtttaatacagcattggaaggctttcagatgttttcttaaaaaaaaacaaaacccaaaaaaactcaacatttaaaaccaaatctcagcttcatttccanaaatattgcagtttggtttaggtaatgtttcatttaatctactccagttnccacaaaatggcattttattaaaaaaacctttcagttatttggtccttttgcaatttgctgtgcacataatgcctactgtaccaaacttttattgcctttaaatttagntgtaattttattgataaaatttaaatctagtgtctttatttnttctgttacaatagtgntgcttgngtaagcaggttanagtgcacagtgtccccaattgntcctggcactgcaaaaccaaattaaacaattccacaaagaattctgacatcaatgtgtntttcctc

SEQ ID NO: 8529 - DNA, 402 bp, Homo sapiens
  misc_feature (1)...(402): n = g, a, c or t
tacttctagagttatatagtcccagagatgtttatgactatttacgtcccattgctctgaatctgtgtgcagacaaagtttcttctgttcgttggatttcctacaagttggtcagcgagatggtgaagaagctgnacgcggnaacaccaccaacgttcggagtggacctcatcaatgagcttgtggagaactttggcngatgtcccaagtggtctggtcggcaagcctttgtctttgtctgccagactgtcattgaggatgactgccttcccatggaccagtttgctgtgcatctcatgccgcatctgctaaccttagcaaatgacagggttcctaacgtgcgagtgctgnttgcaaagacattaagacaaactctactanaaaaagactgtttcttggcct

SEQ ID NO: 8530 - DNA, 591 bp, Homo sapiens
ccaaaaaaatcaagatttaatttttttatttgtactgaaaaactaatcataactgttaattctcagccatctttgaagcttgaaagaagagtctttggtattttgtaaacgttagcagactttcctgccagtgtcagaaaatcctatttatgaatcctgtcggtattccttggtatctgaaaaaaataccaaatagtaccatacatgagttatttctaagtttgaaaagtaaaaagaaattgcatcacactaattacaaaatacaagttctggaaaaaatatttttcttcattttaaaacttttttaactaataatggctttgaaagaagaggcttaatttgggggtggtaactaaaatcaaaagaaatgattgacttgagggtctctgtttggtaagaatacatcattagcttaaataagcagcagaaggttagttttaattatgtagcttctgttaatattaagtgttttttgtctgttttacctcaatttgaacagataagtttgcctgcatgctggacatgcctcagaaccatgaatagcccgtactagatcttgggaacatggatcttagagtcactttggaataa

SEQ ID NO: 8531 - DNA, 555 bp, Homo sapiens
  misc_feature (1)...(555): n = g, a, c or t
gctcacctgcnccaccccaggagaaactgcagacctatcagccagaggntgttaaggcaaatcaagcggaaagtatgtcttcttaagctaccatttacatgttttcatatttgcatttatcatttgcttctaattatctgtctagaccatagtaagaattaacttgttttgtttgttttagggtaatcttacatgagccttctttagaaacagcaatcgattcttttttattttttaatgatacagaaaattgtttatattaattttgtttgcttacttctgcatttatattttgttccactagtcctcanacttcttcagtgaataattttttttttctccaaaattaagataagttctttgtttggagctatgtaccacatcctttcaggtgttcttctgaattatatttaatctttgataatgagtgaaaagcncagacattcctggagtaagacatctatgtgttctctcctagatgatcctaccagacaatatgaangaccattacatnactatcgaccacagcaggaatcaccatctccccaacaacag

SEQ ID NO: 8532 - DNA, 595 bp, Homo sapiens; identical to SEQ ID NO: 8184

SEQ ID NO: 8533 - DNA, 591 bp, Homo sapiens
  misc_feature (1)...(591): n = g, a, c or t
ctgacacaggcaaacagnngcacaagtggaatagaatacaatgcctgattctcacttgttgtctccaaccaagccaacatggagcacatgatgaagtcccactcactctctgccaaaggggatgagcagtatttcagaaatagggaaagaaaccggattatttctatatttacacccagtacctctggacttgcttctgatagattacaactgaaaagaaaaatatcttcatgctctttcttccaggatattatgatttttaatattccatgtaatagctctccatcatctatacttttggtttgcagacaagaattgaaaatggcaagatgtccaaaacctccattagtgctgcaaagatctttcttagtccagcccaaaagagcaggtatacattgagcactaaattctttcttttcttcttttgacaaaaatggacatagactttgaatggtatgcaaattgccttcagttagtggaaaaaaactttcttttctcttataatgtggttttacttcatcagatgaaatgcttcgggaaaggatcaacttancaataataagagaccacagtgtgccatgttctctggac

SEQ ID NO: 8534 - DNA, 485 bp, Homo sapiens
  misc_feature (1)...(485): n = g, a, c or t
ggaatccncanttcaaggttatcctacgcagagagccaggtaccaatgggtgcgctgcaatccanacagtaattctgcaaactgccttgaagaaaaaggaccaatgttcgaactacttccaggtgaatccaacaagatcccccgtctgaggactgacctttttccaaagacgagaatccaggacttgaatcgtatcttcccactttctgaggactactctggatcaggcttcggctccggctccggctctggatcaggatctgggagtggcttcctaacggaaatggaacaggattaccaactagtanacgaaagtgatgctttccatgacaaccttaggtctcttgacaggaatctgccctcagacagccaggacttgggtcaacatggattagaagaggattttatgttataaaagaggattttcccaccttgacaccaggcaatgtagttagcatatttnatgtaccatggntatatgatta

SEQ ID NO: 8535 - DNA, 361 bp, Homo sapiens
cctgtggaaaagggaagtggacaacatttatattacaagacagtaattttattgaaacatctttttttgtctaaaactatgcatggagatattaatctcttgtttataaattaggttaagtctaacatcactatttgaaaccagtgttatttacaaaaatgaacctcttctttgctttattgttggtttacaggaataattttaaaccaacctcaatctatctttaaaaatcttcctgccttcaaatgcccagcaacccttataaggtagggggcagccctttgacagcaacattcatcattcaccaggaatgtagaaccacaagtgaacaacaacaacaacaacaacaagattaaatcat

SEQ ID NO: 8536 - DNA, 582 bp, Homo sapiens
ctgttggtcagtatgccaataacatcacactttggatctttgcagtcactgcaggcatgttcctctatgtagccttggtggatatgcttccagaaatgttgcatggtgatggtgacaatgaagaacatggcttttgtcctgtggggcaattcatccttcagaatttaggattgctctttggatttgccattatgctggtgattgccctctatgaagataaaattgtgtttgacatccagttttgacctttcccagtaatcactgttgattacgagaatgttaccatgcagctttgcatctgttccttgtactgtatgcacattgctcaaaggaaagtcagtggcttgcactacttacaagtttcatagatttgagcctaaccacaagaggctggtgcttagtactgttttccctgcacgtaggggtcttttaaaaatataaagcttgtgataaagagaggagaatatgggactccatgaaccagtgttgatatgtttgattaagacttttcacaaaataatcatataaaacactagtctctttattagtagaaacttctgtggctatgcagaaatagagatc

SEQ ID NO: 8537 - DNA, 310 bp, Homo sapiens
  misc_feature (1)...(310): n = g, a, c or t
caagctttnnttttttttttttttttttttttttaggagccaaaatagttatttattaataatttaaggttttacattcttataataaatttcagctctaaactttacaccacgaacataatggagaatttaactntcccttcttcacaatcaaatgcatttctcttatcaaatgggtacccatgctcacacacacacacttccagttttatacaaatttttttaaaggaaagaaaccaacccaaagtattgcatttgaggngacactccctgaaaaattttatncagaggtaatatactgtttagcaca

SEQ ID NO: 8538 - DNA, 602 bp, Homo sapiens
  misc_feature (1)...(602): n = g, a, c or t
cctcttgaaacctaggcttggaactggcatacagtcacttcttccacattctattgatcaaatcaagtcacagtgccagcccagattcaaatggtggggaaagagacttcatttatggaagggaggagctgcaaatttcattgccaagaggtgtggatacccagaaagatacatttgacaaaccatctatcaaagttactgtcagaggtatgtttttggaaatatcatttggagtgggatgtgtcctgtatgactggaatcgttttctatttgtaacagagaagcgtgcccactccttgcacccatagataacccaatgccgaaggatatgagagagagagatgtccagtttgtgcctctcccagcttcttgtccagagactccttggtttagattttgatacactacttagaaaaggtggagagtttctttaagatttcatccacagagggccgcacagagggatcatgggcccggcactcatcaatgatctcccgcagctctgaagggcagtcttcacccagtggctcctgctgccgnttcacagccaccagcttgcggatcttctcagaattacagccttgaaacgggatatctccagt

SEQ ID NO: 8539 - DNA, 575 bp, Homo sapiens
  misc_feature (1)...(575): n = g, a, c or t
ctggtgggagggatgaaggaaattatctggacgatgctctcgtgagacaggatgcccaggacctgtatgaggctggagagaagaaatgggggacagatgaggtgaaatttctaactgttctctgttcccggaaccgaaatcacctgttgcatgtgtttgatgaatacaaaaggatatcacagaaggatattgaacagagtattaaatctgaaacatctggtagctttgaagatgctctgctggctatagtaaagtgcatgaggaacaaatctgcatattttgctgaaaagctctataaatcgatgaagggcttgggcaccgatgataacaccctcatcagagtgatggtttctcgagcagaaattgacatgttggatatccgggcacacttcaagagactctatggaaagtctctgtactcgttcatcaagggtgacacatctggagactacaggaaagtactgcttgttctctgtggaggagatgattaaaataaaaatcccagaaggacaggaggattctcaacactttgaatttttttaacttcatttttctacactgntattatcattatc

SEQ ID NO: 8540 - DNA, 468 bp, Homo sapiens
ccttgttccactgtgccttggtttctcctttatttctaagtggaaaaagtattagccaccatcttacctcacagtgatgttgtgaggacatgtggaagcactttaagttttttcatcataacataaattattttcaagtgtaacttattaacctatttattatttatgtatttatttaagcatcaaatatttgtgcaagaatttggaaaaatagaagatgaatcattgattgaatagttataaagatgttatagtaaatttattttattttagatattaaatgatgttttattagataaatttcaatcagggtttttagattaaacaaacaaacaattgggtacccagttaaattttcatttcagataaacaacaaataattttttagtataagtacattattgtttatctgaaattttaattgaactaacaatcctagtttgatactcccagtcttgtcattgccag

SEQ ID NO: 8541 - DNA, 638 bp, Homo sapiens
  misc_feature (1)...(638): n = g, a, c or t
ccaacatggngaaaccccatgtttactaaaaatacaaaaattagccaggcatggtggtgcatgcctgtaatcccagctactggggatctgaggcaggaggatcgcttgaacccaggaggcagaggttgcagtgagctgagatcatgccactgaactccagcctgggcaacagagagactccgtctcaaaaaaaaaaaaaaaaaaattcatcaaggtatatacatatacattcagattagtgtacatgtaaaatatgatatacaacagagcctttcatgaataggataatttgcatattcatatggaaaacatatgcagtatcttaagccatagttttccaaaatttcaaattaaatacttatagctttgacatattcctgttacttcaactttccagggatgctctagaagaaacgggagacatgttgtaagactttaatgacattccacaaactaaatttattgtgggaattaacatcagaaattaagggaaaaaatactctaatttgatcactanctgctacaagactccctanaaagtggaccatgtntatttttttcacaattctgtttgctaagtggaaaagctgcttcttggnagactcaaacatgacacatactgaaatggcaagcaatga

SEQ ID NO: 8542 - DNA, 533 bp, Homo sapiens
  misc_feature (1)...(533): n = g, a, c or t
cctgaaaagtggttctggaaaagtgtaccaaggccctgcaaaaggtgctgctgatacaacaatcatactttcagatgaagatttcatggaggtggtcctgggcaagcttgaccctcagaaggcattctttagtggcaggctgaaggccagagggaacatcatgctgagccagaaacttcagatgattcttaaagactacgccaagctctgaagggcacactacactattaataaaaatggaatcattaaatactctcttcacccaaatatgcttgattattctgcaaaagtgattagaactaagatgcaggggaaattgcttaacattttcagatatcagataactgcagattttcattttctactaatttttcatgtatcattatttttacaaggaactatatataagctagcacataattatccttctgttcttagatctgtatcttcataataaaaaaattttgcccaagtcctgtttccttanaatttgngatagcattgataagttgaaaggaaaannaaatcaataa

SEQ ID NO: 8543 - DNA, 591 bp, Homo sapiens
  misc_feature (1)...(591): n = g, a, c or t
ctcctatgnnataagaggaaagtttatcctctatactattcagatgtaaggaatgatatattgcttaattttaaacaatcaagactttactggtgaggttaagttaaattattactgatacatttttccaggtaaccaggaaagagctagtatgaggaaatgaagtaatagatgtgagatccagaccgaaagtcacttaattcagcttgcgaatgtgctttctaaattataaagcacttgtaaatgaaaaatttgatgctttctgtatgaataaaactttctgtaagctaggtattgtctctacaaaattctcattgtatagttaaaccacagtgagaagggttctataagtagttatacaaaccaagggtttaaatacctgttaaatagatcaattttgattgcctactatgtgaactcactgttaaaggcactgaaaatttatcatatttcatttagccacagccaaaaataaggcaatacctatgttagcattttgtgaactctaaggcaccatataaatgtaactgttgattttctcacttggtgctgggtactaggttnataaaattgtatgatagttattatatt

SEQ ID NO: 8544 - DNA, 518 bp, Homo sapiens
ccagctgtgaaactgatgaaaaagtttcttccgaataatctacattaacttgagagatattgaggtatgtttcttgattatcttctcccacaaatggcgatgtgtgagttaacaacatatatgctattataccaatattccacatatctgttgctgtggtaatgggatcatagttcaggatttctggagctaaatattctggtgttcccataatttcccgaagttcacacgcatgccctatttttcgagacattccaaaatctactattttaatgtccccgagagggtatatgctgctcagtaatatattctgtggctttaaatcaaggtgtacaatgttattctgatgtagataataaactccttcaagtatttgtttaatgagtctgataacatcattttcagaaaccatttcagccaactcaggtaaacacaggctgaaaatttctccacctgcagcactaaaataaaattcaaagaacagagacttgaaaattcattcacttaaacacttttaa

SEQ ID NO: 8545 - DNA, 597 bp, Homo sapiens
ctgactatatctcagggtagcttccttgtttctactcagaagctagttgggccacaactgtcacgacattctgcagagattcccaacctgggattccagaagatctctggacaggtcccttcagtaggcaagcgtctgagtagacagcaggctgatgaagagctgctaataattggtgggcttgctgtgccagtacacttgcggagtacctgttggtttgtcctgctgatgccccccaaccatgctaaataggtctgaggcacacattacatttggttgaatgagcccgttaatatcctaccacagatgaatacaatgaggtgacaggaaaacctaggaaccatgacttatgaagactggctgttaaagtagcatttatgaaaatggggtaagcacaaggctgataaaactaaaggatctggaagctcatggctagacttagtctgcagagaaaacccacccagttctacacaaagccatctccccacttttcaaaaataggtttttcacactagaattctggaaatgacttcatttggctttcctggcctgtatggatatgggtttacataacattggttacaatatatttattcc

SEQ ID NO: 8546 - DNA, 583 bp, Homo sapiens
  misc_feature (1)...(583): n = g, a, c or t
ctgggcgcatgaaagcagagttctttgcagatgtagttccagcagtcagaaagtggagagaggccggaatgaaggtgtacatctattcctcagggagtgtggaggcacagaaactgttattcgggcattctacggagggagatattcttgagcttgttgatggtcactttgataccaagattggacacaaagtagagagtgaaagttaccgaaagattgcagacagcattgggtgctcaaccaacaacattttgtttctgacagatgttactcgagaggccagtgctgctgaggaagcagatgtgcacgtagctgtggtggtgagaccaggcaacgcaggattaacagatgatgagaagacttactacagcctcatcacatccttcagtgaactatacccgccttcctcaacctagagaagggttgttaaggcagaccgccctgttccccananttgtccctgtagtgtctaggtttattctaatggtaaaagtaacttacttaaaaaacatatgtacacatatgtatgcaagtatgtatatatgtgtatgctcagattaacttccataggtacataagtgna

SEQ ID NO: 8547 - DNA, 612 bp, Homo sapiens
  misc_feature (1)...(612): n = g, a, c or t
catgtggagctgggacgtggagtgcgatacgtgcgccatctgcagggtccaggtgatggatgcctgtcttagatgtcaagctgaaaacaaacaagaggactgtgttgtggtctggggagaatgtaatcattccttccacaactgctgcatgtccctgtgggtgaaacagaacaatcgctgccctctctgccagcaggactgggtggtccaaagaatcggcaaatgagagtggttagaaggcttcttagcgcagttgttcagagccctggtggatcttgtaatccagtgccctacaaaggctagaacactacaggggatgaattcttcaaataggagccgatggatctgtggtcctttgggactcatcaaagccttggtttagcattttgtcagttttatcttcagaaattctctgcgattaagaagataatttattaaaggtggtccttcctacctctgtggtgtgtgtcgcgcacacagcttanaagtgctataaaaaaggaaagagctccaaattgaatcacctttataatttacccatttctatacaacaggcagtggaagcagtttcagagaactttttgcatgcttatggttgatcagttaaaaaag

SEQ ID NO: 8548 - DNA, 492 bp, Homo sapiens
cctcgtgaggcgaggcggcaaaatttgatttcttggaggacacctgagcatatacggtcaaagtctgatgacaacaccagtagggatgaagctgggagtggggtggctaagaacactggacctgacactattagacatgggttccagcttcaggtctattactgctcactgtggccgagcaacagagctacttaggtaaaatggtgatggtcataacactagcccacagggaggttacgaacctctggtgacaatgtaagtgaaaggcccctgagaaagagtgagggagttgcaaatgtcagtagccatcaagatcttctttaagaatagtttccactaaagagatgattgctttggtttccagccttctttgttttgtctccccgctgggccttctacctttaaagggctttggctctgggggaattgagttggctggggcttgatgacttccaagaggacacaagtggagatctactgcctgctcttggc

SEQ ID NO: 8549 - DNA, 524 bp, Homo sapiens
  misc_feature (1)...(524): n = g, a, c or t
cctatactcttaatgnactttattaaagtcccacatgagcaccgtgcaataattagagtttccccaataagtttacccaactatcaacctttattagtacttatggcttatggtgtggtttaatgtcttttttatttttcgaaaacaaatggcacttaagtgcacttcaaaaactgttaggtgatataagtaagctagaaaagtaagatcatcatgggctcttttctaacaaacgtgttgatgaaatgataagcaaaatgatgttacccctatgatatctagtaagacaccatggagcatcctagttttatccaagtactgcccaactaatgcaatttatgtcctgaatgtgcattagaatatcctgagtttcagtggcctgttaactggtaaacagtgccacagaaaacacaacactgggtagaggaaagtgggtagaggaaaatcccctgagcttaaatgatcttagatgaggtcttgttttgattttctattttatatatatttcatgttaaaatatctgg

SEQ ID NO: 8550 - DNA, 646 bp, Homo sapiens
  misc_feature (1)...(646): n = g, a, c or t
cctcctcgaccaaggcagggaacttcaatctgtataagtatctgcagttgctggaataatttgaagaccccatggagctaaggagattaagtggaggattttcattgtttcagaggggcaaggggcaaatccattgctaattctttaatgatgaaaaatggtaagaagttgttaaactcctttggggattttaaaaagtgatacgtaaacagaagagagagagagagagagaaatcacagtagtgaggctaacaaaaataatgataaaaaggttagaagaacccaggatacttagtggatgcctagacaacataaaaatagatttatagaaggaagcaatggaatttgaatataaaagggtatcagaaagttaatgtgttgcatctgaaattcaaagtatttccttttggctacacaagaaagacttttaataaaaccctttgtatatatttctgaaaggtaaatattttatagggaaatggaggattggaagaaaatctgttccatcatgtctgggtattagaattttgcttaataacttgccaaaatattacgcttccaagggctatggcattatgtgtgtacccaattaaagcaatttttctttgctttgtctcctaacttaaattcaaatgacatatnaacc

SEQ ID NO: 8551 - DNA, 394 bp, Homo sapiens
  misc_feature (1)...(394): n = g, a, c or t
ctgaggtngncagtacaatgaaaccaaactggcgggatggaagcagattattctgccatttttccaggtctttgagttgcacgtcaaatctggggctgatcaccccacacttgtttagcctgcctgtgaggttcacaacaattttcccagctctgtggtcatcaatgatttcaaattcgccaatgtaaccatgcttcatcatcacagtgagaaaccggacgatgactttggagcacggcctaataagcacctggcgtttgcctctcttttcggcattgttgatactcttgagagcatctgccaggacattcatgcgcaccattgtggcttagattgcaggatggcgccgatggcagacggatgaaattggagctctcagagagtgctactcgcc

SEQ ID NO: 8552 - DNA, 507 bp, Homo sapiens
  misc_feature (1)...(507): n = g, a, c or t
ctggtatttngcctaagatctatttaagataaccttttcttatattttttacttaatattgggcataatcgtatcattcaagattaagtctgggttatttctttgataagaactgaatgtggccgggcgcagtggctcacgcctgtaatcccagcactttgggaggccgaggtgggtggatcacaaggtcaggagatcgagaccatcctggctaacacggtgaaaccctgtctctactaaaaatacaaaaattagccgggtgtggtggtgtgcacctatagtcccagaactcaggaggctgaggtgggaggatcacctgagcccaggaggtcaaagctgcagtaagctgtgattgcgccactgcactccagcctgggtaaagagtgaggccctatcttaaaaaaaaaaaagggtgggcgtgatggctcacacctgtaatcctagcactttgggaggccaaggtgggtggcttacttgaggtcaggagttcaagaccacccttggacc

SEQ ID NO: 8553 - DNA, 597 bp, Homo sapiens
  misc_feature (1)...(597): n = g, a, c or t
cctcataaaangcaaaacaaaaattaggtattttgtcctaaaacacctggtaggagtgtgtgatttttttgcattcctgacaaaggagagcacacccaggtttggaggtcctaggtcattagccctcgtctcccgttccctttgtgcacatcttccctctccccattcggtgtggtgcantgtgaaaagtccttgattgttcgggtgtgcaatgtctgagtgaacctgtataagtggaggcactttagggctgtaaaatgcatgattttgtaacccagattttgctgtatatttgtgatagcactttctacaatgtgaactttattaaatacaaaacttccaggctaaacatccaatattttctttaatgcttttatatttttttaaaatgttaaaacccctatagccaccttttgggaatgttttaaattctccagttttttgttatatagggatcaaccagctaagaaaagattttaatcaagttgaattgaggggattaatatgaaaacttatgacctnttcctttaggagggagttatctaaaagaaatgtctattaaggngatatatttaaaaatatttttgggtgttcctg

SEQ ID NO: 8554 - DNA, 170 bp, Homo sapiens
atgtagctgatatattactataacctcacttgcatttttaaattattttactggttctctctttttacttttatcttacctatgctgtatttgaagttagttttatatagacagaattttaaaaattatttatttatggggtacaaatgcaatttggacaatattgttgg

SEQ ID NO: 8555 - DNA, 337 bp, Homo sapiens
  misc_feature (1)...(337): n = g, a, c or t
accacatagatagcttgacaaggagtgctgtctgtccttaccacattttcagcactcagcacagtgccttgtgtataataggcactcaatttattataaatcttcagtatgtcctgagaacagctttagtcatggaatactgggagaaggaataactttcacaaaataaacttaaaacagcctgtaattattgaggttcatattcttctggtatatcattctgagaaattgtggctaatttanaacattgtttagaattgacaaaaggccctggcaattaaattgtcaaggcccaagggctaattttaattttctttttacttggagtcattcaaag

SEQ ID NO: 8556 - DNA, 285 bp, Homo sapiens
  misc_feature (1)...(285): n = g, a, c or t
cctatttganagaggaaatgtatgatgaagctattcaggattatgaaactgctcaggaacacaatgaaaatgatcagcagattcgagaaggtctagagaaagcacaaagattattgaaacagtcgcagaaacgagattattataaaatcttgggagtaaaaagaaatgccaaaaagcaagaaattattaaagcataccgaaaattagcactgcagtggcacccagataacttccagaatgaagaagaaaagaaaaaagctgagaaaaagttcattgatatagcag

SEQ ID NO: 8557 - DNA, 562 bp, Homo sapiens
  misc_feature (1)...(562): n = g, a, c or t
tgaataaactaggtattgatgcaacatatctcaanataataagagctatttttgacaaacccaccgncaatatcatactgaataggcaaaagctggaagcattccctttgaaaaccagcacaagacaaggatgctgtctctcaccactcctactaaacatagtataggaagttctggacagggcaatcaggcaagaaaaagaaataaagggtattcaaataggaagagagaagtcaaattgtctctgtttgcagatgacatgactgtatatttagaaaaccccatcatttcagcccaaaatctccttaagctgagaagcaacttcagcaaagtctcaggatacaaaataaatgtgcaaaaatcacaagcattcctatgcaccaataacagagagccaaatcatgagtgaactcccattcacaattgctactaagagagnaaaatacctaggaatacaacttacaagggatatgaaggacctcttgaagtanaactacaaacaactgctcaaggnanttaagagaggacacaaacaaatgaaaaagcattccatgctcatgga

SEQ ID NO: 8558 - DNA, 491 bp, Homo sapiens
ccaagaactcaaagaggcagcattggaaccatcgatggaaaaaatatttaaaattgatcagatgggaagatggtttgttgctggaggggctgctgttggtcttggagcattgtgctactatggcttgggactgtctaatgagattggagctattgaaaaggctgtaatttggcctcagtatgtcaaggatagaattcattccacctatatgtacttagcagggagtattggtttaacagctttgtctgccatagcaatcagcagaacgcctgttctcatgaacttcatgatgagaggctcttgggtgacaattggtgtgacctttgcagccatggttggagctggaatgctggtacgatcaataccatatgaccagagcccaggcccaaagcatcttgcttggttgctacattctggtgtgatgggtgcagtggtggctcctctgacaatattagggggtcctcttctcatcagagctgcatggtacacag

SEQ ID NO: 8559 - DNA, 177 bp, Homo sapiens
  misc_feature (1)...(177): n = g, a, c or t
gagtggcttnctaacggaaatggaacaggattaccaactantngacgaaagtgatgctttccatgacaaccttaggtctcttgacaggaatctgccctnagacagccnggacttnngtcaacatggattanannaggattttatgttataaaagaggatnttcccaccttgacacca

SEQ ID NO: 8560 - DNA, 512 bp, Homo sapiens
  misc_feature (1)...(512): n = g, a, c or t
ctggcctcattgagctgctttctaatattaacgtgtaatgatgaatccattttatcaggacagtaggctacaaattgctctttggaaaataagtcaaacttaattctcatgaaaacaacctatctctctctccatatatatacatacatacatacatacatacatacatacatacatataaacatattccaaagatcttaaggtctatgatcaggttttatcatcacaggaaatttggaaaaaagtaaaaccaacttcagactctttttaacttatggctgtgttatctaatggctctccttaactgtcattaagagataaaatagctccagtgttacagacatncccgggcggccgctcgactcttttttctctccttccgggggaccaaggtaccttctggggcatacaacatggcagcagggcctcgggaagaggggtaggaggaccgagcagcattctctgtagaggaagacaggaaaggagaccctcttggcacacatttatggagg

SEQ ID NO: 8561 - DNA, 516 bp, Homo sapiens
  misc_feature (1)...(516): n = g, a, c or t
tattctaaattttgtagctcctgaccttacatccttttcttccttatgtctttcagatccaggtgaacttgagagaattagagacagccactgggctccccccggggttgaaacgggtttcccagaccaggggttcagaggagactatttatccttcatgatctttggcgattctccactggagcggaagggctgtgtgtcaaaagaaggaagccaggctgtgaagggccgtgttgctttcagtgggtgggcagaggtttagaaaggtggttctgaaatggcacctggtactcttgtgggacctggggaatataaggaactctgtgcatgaggtttcaaaaataaaaattgagtccactctccccgtacacacacactcgggcacttcangaggtcagttctcaccccttcctcgatggggctttaaagctctggggagaagagctgctccccactcatgccccagagggactgtgaaaaggcttcctgtgacctccgatggcggcccctcattgg

SEQ ID NO: 8562 - DNA, 481 bp, Homo sapiens
  misc_feature (1)...(481): n = g, a, c or t
ctattttcanngttctcacaacaaaaagataaatatgtgacataagagatgtgttaagcagcttgatttaatcattccacaatataaatatatacgaagacataatactgtacccctcaaaacaattattatttatttaaaacatttaaaaacaaaaaatgagacaaatatcangaaagtaattttatacataagctagataattgcctatagctgcgtatgctgtnaaataatttctgtttgaaaagacgggaaaaattatatggcaaaaccatantgcagtaataaatttgccatgtttagtaaacaaaatatagttcaatgtgactgaagcataccaagaggcaggagaatgtggtgtacactgtantgtagaggagtgtcttagtttgggctgctatacanaataccatagatngagtggcttacaaataacanaaaaagtatttcttactgttctaggggttggaagtccnnagtc

SEQ ID NO: 8563 - DNA, 195 bp, Homo sapiens
  misc_feature (1)...(195): n = g, a, c or t
tccctgcaaatgggacttacgagtttggttatcanatgcactttatttgtaatgagggttattacttaattggngaagaaattntatattgngaanttaaaggatcannagcaatttngagcggtaagcccccaatntgtgaaaaggttttgtgtacaccacctccaaaaataaaaaatggaaaacncaccttta

SEQ ID NO: 8564 - DNA, 195 bp, Homo sapiens
ccatagcttcatccttgcctttcatgcccactaaaaacttaacaagtctagcaggatgttggaatccatctcgaagttcttgtgggtcctcagcaagagcacatgacttatgatataaatcttccatactagggctagccatcagcattacctttgcactgtataagtggtcagcatctggtggatcaagaatgg

SEQ ID NO: 8565 - DNA, 572 bp, Homo sapiens
  misc_feature (1)...(572): n = g, a, c or t
ggttcagtatctgcctcttttaggtcagagtatgctatgagtagcaatacatacatatatttttaaaagttgatacttctttatgacccacagttgacctttattttcttaaataccagggcagttgtggctcattgtgcattttactgttggcccattcatttcgtttttggaaattatggttttgtattttcatgtttatttacattcatttttgtttattcagggaaagctgatctttttttcaaaccagaaaaaaaaatgaactagatatgaagtagagttcattaaatatcttgctattgtcagagtttttaaaatatagacttaattttgtttttttaaattggaatacaataaagtactacctacatttgagtcagtcaccactcttattgtgcaggttaagtacaagttaactaaaaataaactgtcctctctggtgcaactcacaaccaagatcaagattaccttaaaatttatttgaattttttagatgttttggntgncaaactgnaaggaaacttcacaacatttaagtcttactctgtatgtaacnatccatcattcac

SEQ ID NO: 8566 - DNA, 598 bp, Homo sapiens
ctggcagatgcagaagaagcgatgtatcagaatgtggatggccgtgtttcggaatgtcctcacacctaccaaaacaggcgacctttcagcagagagatggatttggggctactctctccgcaggctcaggtcgaagattcgtagaggaacaatttagttttaaggacttcatccctccacctatccctaacaggctgtagattaccaaaacaagattaatttcatcactaaaagaaaatctattatcaactgctgcttcaccagacttttctctagaagctgtctgcgtttactcttgttttcaaagggacttttgtaaaatcaaatcatcctgtcacaaggcaggaggagctgataatgaactttattggagcattgatctgcatccaaggccttctcaggctggcttgagtgaattgtgtacctgaagtacagtatattcttgtaaatacataaaacaaaagcattttgctaaggagaagctaatatgattttttaagtctatgttttaaaataatatgtaaatttttcagctatttagtgatatattttatgggtgggaataaaatttctactacaaaaaaaaaaaaaaaaaaaa

SEQ ID NO: 8567 - DNA, 595 bp, Homo sapiens
  misc_feature (1)...(595): n = g, a, c or t
ccaggctggtctcgaaatcccgacctcgtgatccacccacctcagcctcccaaagtgctgggattacaggtgtgagcaacctcgcccagccccaagtttattaaaaagcactactgcaatacccaacaaattaaagggtaggtactttgaggaagtagagcctgccccctttaaaagcaggacaagctacactttcagaatagggaaaaaatgtatctgagggatttattaacacttagcaagggcaggatttaaatagtttgagcagcaaaagagtttttccagaagttttatttacttttatttaattgcagtctaaacatgtgtcttacagtgagcgttttcatataaataatttacagaaaaaggttatttacaaagccacagatctcattcagttaggtaatatggttttctagttattatgggaaaggttaacacttgattgggtctatacagtgccttaaaattgccctcaccacatgaagctctgtccagatgacaaagagaatgtatacctcttcataagtgactatatatactcctgaatccataatcactctcagacctgtgtgaagcttggttaaggngagat

SEQ ID NO: 8568 - DNA, 417 bp, Homo sapiens
  misc_feature (1)...(417): n = g, a, c or t
agctagantaagntggncatgatgcagaanctnctcaaatgcagnnggcttgtcctgnctcttgccctnatncnggttctggaatcctcagttcaaggntatcctacncagagagccaggtaccaatgggtgcgctgcaatncanacagtaattntgcaaactgccttgaagaaaaaggaccaatgttcgaactacttncaggtgaatccaacnagatcccccgnntgangactgncctttttccaaanacgagaatccaggacttgaatcgtatcttcccactttctgaggactactctggatcaggctnnggctccggctccggctctggatcaggatctgggagtggcttcctaacggaaatggaacaggattaccanctantagacgaangngatgctttccatgacaacctt

SEQ ID NO: 8569 - DNA, 559 bp, Homo sapiens
  misc_feature (1)...(559): n = g, a, c or t
cctggctcttgccctcatcctggttctggaatcctcagttcaaggttatcctacgcagagagccaggtaccaatgggtgcgctgcaatccagacagtaattctgcaaactgccttgaagaaaaaggaccaatgttcgaactacttccaggtgaatccaacaagatcccccgtctgaggactgacctttttccaaagacgagaatccaggacttgaatcgtatcttcccactttctgaggactactctggatcaggcttcggctccggctccggctctggatcaggatctgggagtggcttcctaacggaaatggaacaggattaccaactagtagacgaaagtgatgctttccatgacaaccttaggtctcttgacaggaatctgccctcagacagccaggacttgggtcaacatggattagaagaggattttatgttataaaagaggattttcccaccttgacaccaggcaatgtagttagcatattttatgtaccatggttatatgattaatcttgngacaaagaattttatagaaatttttaaacatctgaaaaag

SEQ ID NO: 8570 - DNA, 594 bp, Homo sapiens
  misc_feature (1)...(594): n = g, a, c or t
tttttttttttttttttttaagaggtgagttctccctttgtgatcacgttgaagtgcagtggngggaccatagttcactatagcctccaaactcgggctccagcgattctcctgcctcaggcttctgagtagctaggactacgggtatgcaccaccatgcccagctaattttttaaaaatgttttcgtanagatgagggtctcactaaggctgcctaggctggtctcaaactcctggcctcaagnggtcctcccactttgaactcctaaagtgttgngattattggtgtaagccactgngcccagcctatanaaatgttttgcncgaatttctggaaccatcanaaaacaccagagtctgccananaagtccccaaatagcacaggaataaatggcataaaatattaataattcatgtctcagcaagggaataggcagagaacacatgttcagcaccagcagtgccaggagctgttattttgacctaacttgctccaaatgaaagtccagacacaatctctcacacaaaattcttcaccggctcaaccataacaagaatagtccctaatagcatttattaagtgctattatgtg

SEQ ID NO: 8571 - DNA, 252 bp, Homo sapiens
  misc_feature (1)...(252): n = g, a, c or t
aaataaaatnaaaaaaggtcnaatgggaagctgaaaaataaatnanagntgactcttttaaaacaataataaattaaacaagcaaaaatcgacncaaattaaaattggaaattacaaaggaaagaaacaacaatcaataaacagttattaaacaaaaaaggttttaaaaaattatgatgaantactatgcacagnngtttggcaatatactatatgtaaangtgtatttaaataaattggcattctccacac

SEQ ID NO: 8572 - DNA, 142 bp, Homo sapiens
ctggggaaagaaagaggaggaagtggaaaaagagtaggaggagggtggttctctccagggcacccttcctgctttgggatggtgactcacccagcaggccctgggagaggcaatttatcagccccaacgaagacaggccagg

SEQ ID NO: 8573 - DNA, 532 bp, Homo sapiens
  misc_feature (1)...(532): n = g, a, c or t
gaggtctggtatagattcanttactaatgcagtanctaagaaaaaatgngacttttcantancttcacngganagttgtgtaagattccaagccatttgcatctggatctggagtngacatgttaactaaagaagtgtnttnctccttcatttctttatcatcactgtaagttttctttgttgttagtacagaataatctgtggttttgagttcagtttcagtaaatgtctgtgaatcaaagattgtttgttctgttgcagganagttttgaggggattcaaatgacttttcttcttgaatttgttcctctgatgttgtttcactttcaatttcttgncttacagggttgacttcttgcctagaccataatttggctggctctatagtttggggaaagtttgntgaaactgtgccactgacctttacttcctccttctctactggagctttcgtaccttccacttctgctgttggtaaaatggtggatcttctatcaatttcattgacagtacccacttctcccaatccttc

SEQ ID NO: 8574 - DNA, 592 bp, Homo sapiens
ggcaacccaaggaaaggaaatcacctcggtcggcagtgtgactgctgagactgccggggctgctgcctgctgcttctcgcgcctgtcctctccaagatgcagttttttgatgctgaggagctcctggtcgatgaagaggatgatgtttttggtgaaggtaaatgcatctttctggcaggaggctctccggtctgctttgctttgttttgacaccactggacacttttgcccagcttgggcaaggacttgagtattttgaaatgataaaaacaaagcatcctgagtgaggtagtggctgcaaatatcaacttaggcactgaaggaatacacaaggcaaggggtggaacaaggggttgagtcattcccgcaaatacattttttaaagtcatgactaaaataaaggtttagtttaggctggaaaatagtactaaattttttgccttgtctctcttctgtgctatctcttgtctaacaccttaaggaaagcctgtcacagtggtttgagcacagcagggctgctagggaagaagttaaataaatggaccaggagtggtttttcatggtaccatgttgctttgatttgcacttctct

SEQ ID NO: 8575 - DNA, 337 bp, Homo sapiens
ccaggaaaaagaaagaaaaacaaaacaaaacagaaaaggtcgatcttgccttgaaagcgggcagtggctattttcttctctctgccaaagcaggacacgttattcttaacacagagggccacatcgctgtccctcacaaatacttcagacagttgtcttcaacatcctgtggttcttcgtccgattccttttttttttttgagatggagtctcgctctgtcccccaggctggagcacagtggtgccatcttgacttactgcaacctccacctcccgggttgaagggattctcctgtctcagtccccccaaatacctgggattacaggcgcccgccac

SEQ ID NO: 8576 - DNA, 255 bp, Homo sapiens
  misc_feature (1)...(255): n = g, a, c or t
tttgtantcttccaagttcagagatctccttggagccccatccttggntggcggagccttggaggtgatggctaaagcctttgactntganctgggaacttgtaagtcaatcttcacatcaaaatcgngtnctttgaacagatcttctaagaggtcactggctgactnanaattcaaatctttatctttgccttgacccttgctcatttnctttggagcatctggtaacactncagaaccgnattttgcattcag

SEQ ID NO: 8577 - DNA, 428 bp, Homo sapiens
ccaaggaatggcattgtgcagaggcataccgggaagctctctggatgcaaccccacctctaccgcttggcagtcaatgaccttggcatgatgtttcttcacttctctgaggctaggtctttgattctgaacatggggactgtaatgcctgcctgacctgtgttagaacagcatgtgtcactgagtggaggtgggaggaatttgtaaactgtgaagtgctagccacacaggtgggaaaggtaagcctatcctgtagagctctgctgccctgacaatgcctgggatttggccttcttttctggagcacactaaggcaatcttggctagtgcatcagacgggagtgagccccagtgactgagtaaatggagaataagacaaggaacacgagcatccggcctgtgcagacatacaagcagaataaaccacag

SEQ ID NO: 8578 - DNA, 551 bp, Homo sapiens
ccagcatttgacagtggaatgtcttcccaggatgtacacattttccccaataatcttgaacacttcccatttacctctagagcatctttcttgtcctgattaaggaggtatccttctcttgctctctctcagttgaggttattttgtaggaaaaaatgattgtagccagggcttgaaagtggcagggaataagtttgagtgtcccctatctttcctcatgacagtgctggagcattagcacaaagcctgtctatcatcatgggaaataatcccacccaaacacactgggaagacgtgagggtgtctccttggtcttattagcctagcagaaggacagaaagatgaagggatgtggggttgcggggaatgagaagcgctgaacacctggaatttgttcccttgggccgacaggttgcagcttgcttgctgttctccctctgtctgagaacacttcgtatttaacactctctaattctgcttgcacatcctctacttccttccttcttttcacctctcaaggtttgtgcccaaatatggctctatttcagctc

SEQ ID NO: 8579 - DNA, 473 bp, Homo sapiens
  misc_feature (1)...(473): n = g, a, c or t
ggtcttgaactcctgacctcangtgatctgtctgtcttggccttctagagtgctgggattacagggttgagccaccgcacccagccgggatataaatatatttaatcttcacaccaactcatgatgtaggttctattataaattccattttatagatgatgaaactgaggcacagcgaggttaggttatttgcctaaaatcgtcacagtaagagacagagcaaggatttgaacccaaacaatctgnctccaganncancgtccttaaccactgttctctcntgcttttttgtaagtacatnnacataattttcaggagaaaggttgtgctagactttgtagaaaaatcttttctcatcctaatgtgagaaatatctgccatggttcaatgtatgtgagtgtgttatatctttcangagtgttggggtgggaaaaaagtttgagaagtactatcctaaagagtattttgtctta

SEQ ID NO: 8580 - DNA, 265 bp, Homo sapiens
ccattttcttttttcaccttaaaggtcaaacatgaaacaatgaggaatgtaggtctttgtaaaacacataaatacctgtgatgttttgaatcatttggcccttaaaaatattgcttaacaagttaaacccagcttaattgtaggtaaatgcaagtatacccaaggctggactattttagtctgcttttggctgcagattgtacttctgtggctggaaaaaatgttcttcaatagcactgaccagttcattcagttccttcttcag

SEQ ID NO: 8581 - DNA, 369 bp, Homo sapiens
  misc_feature (1)...(369): n = g, a, c or t
ggttattcnagtgaccganaccgcggccgggaccgagggtttggtgcacctcgatttggaggaagtanggcagggcccttatctggaaagaagtttggaaaccctggggagaaattagttaaaaagaagtggaatcttgatgagctgcctaaatttgagaagaatttttatnaagagcaccctgatttggctaggcgcacagcacaagaggtggaaacatacagaagaagcaaggaaattacagttagaggtcacaactgcccgaagccagttctaaatttttatgaagccaatttccctgcaaatgtcatggatgttattgcaagacagaatttcactgaacccactgctattcaagctcagggatgg

SEQ ID NO: 8582 - DNA, 588 bp, Homo sapiens
  misc_feature (1)...(588): n = g, a, c or t
ctgagacgggaactgaattcttccccaggaagaaaatacctatacccacaataggtctgcaaaatctcccacaggcacctcttctccctttcttgtggttgtttgttaattggtttgttttgcctaaaagcaagatggcaatcttaatcaaaaagggaagctagatttttaaaataacttaaaaaaaccatttttatataaagcagcaaaaacatatcttcctctctgcagaaagaaaaatgttaacaaggaaacacagcgatgtgaacggactgtccgtcaactcctgctccactggatcccccatccagcttcacctcgagctactccttaactccagcagtgctgtctgaagaagatcctttggcgtcttcaactgctcttttactttcttgattgagactttcattttcggacctggtcccattagggatagagttttcaccgtttacaagcccgttttctgtggcctttgctttgctgattgcctctctgatgttcaaggcatcctgcactccagcctcctcctcgaggtttctcaagaccagggggagcctcgagtcccccacgctgntctccaacagccca

SEQ ID NO: 8583 - DNA, 518 bp, Homo sapiens
  misc_feature (1)...(518): n = g, a, c or t
cttggccatcctgctctttgtatatgaacagaagctgaatgagtatgtggctaagggtctgaccgacagcatccaccgttaccactcagacaatagcaccaaggcagcgtgggactccatccagtcatttctgcagtgttgtggtataaatggcacgagtgattggaccagtggcccaccagcatcttgcccctcagatcgaaaagtggagggttgctatgcgaaagcaagactgtggtttcattccaatttcctgtatatcggaatcatcaccatctgtgtatgtgtgattgaggtgttggggatgtcctttgcactgaccctgaactgccagattgacaaaaccagccagaccatagggctatgatctgcagtagtcctgtggtgaagagacttgtttcatctccggaaatgcaaaaccatttatagcatgaagccctacatgatcactgcaggatgatcctcctcccatcctttccctttttaggtccctgtcttatacaaccaganaagtgggt

SEQ ID NO: 8584 - DNA, 276 bp, Homo sapiens
  misc_feature (1)...(276): n = g, a, c or t
cattgncagttcttgtctagttttcattaaaagaacaaagatcttttatatggatatcttataaatatataatcattgctaagtaagaagttaagttgttgctatcgcaacaatcctggcagacaattgagtaatattttgatgacttattttgtttgtaattagttattataagaagatctagatcctagatattagaataaaatttattttctactgtatccatttcaaatgttaaaatattgnttantatttttgaaatccctgagtatcagg

SEQ ID NO: 8585 - DNA, 389 bp, Homo sapiens
  misc_feature (1)...(389): n = g, a, c or t
ccaggaaaaagaaagaaaaacaaaacaaaacagaaaaggtcgatcttgccttgaaagcgggcagtggctattttcttctctctgccaaagcaggacacgttattcttaacacagagggccacatcgctgtccctcacaaatacttcagacagttgtcttcaacatcctgtggttcttcgtccgattcctttttttttttgagatggagtctcgctctgtcccccaggctggagcacagnggtgccatcttgacttactgcaacctccacctcccgggttgaagggattctcctgtctcagtccccccaaatacctgggattacaggcgcccgccaccacgcccggctaatttttgtatttttaatagagacatgctttcaccatgttgg

SEQ ID NO: 8586 - DNA, 223 bp, Homo sapiens
ctgtttgaccgaacaggtgatggcaagatcctgtacagccagtgtggggatgtgatgagggccctgggccagaaccctaccaacgccgaggtgctcaaggtcctggggaaccccaagagtgatgagatgaatgtgaaggtgctggactttgagcactttctgcccatgctgcagacagtggctggggctctcagccgcccaaggggaggacaacagaggtcag

SEQ ID NO: 8587 - DNA, 451 bp, Homo sapiens
  misc_feature (1)...(451): n = g, a, c or t
tggattggatatggtnggagtggcacanactggatctgggaaaacatngncttatttgcttcctgccnttgnccacatnaatcatcagccattcctaganagaggcgatgggcctatttgtttggtgctggcaccaactcgggaactggcccancangtgcancaagtanctgntgaatattgtanagcatgtngnttgaagtntacttgtatctacggtggtgctcctaanggaccacaaatacntgatttggagagaggngtggaaatctgtattgcaacacctggaagactgattgactttttanagtgtggaaaaaccaatctgngaagaacaacctaccttgtccttgatgaagcanatanaatgcttgatatgggctttgaaccccaaataangaagattgtggatcaaataagacctgatangcaaactctaatgtggagtgcg

SEQ ID NO: 8588 - DNA, 588 bp, Homo sapiens
  misc_feature (1)...(588): n = g, a, c or t
caaattttcctgaagaaaagtaggaaattattatttataagtataattaaagagagatctttaatttcttttttttttttttttgagacggagtctcgctctgtcgcccaggcgcaatctcagctcactgcaacctccacctcccgggttcatgccataaagaaaggtttcttatttggattcagctaatactcatggaatgcattttctttaacacctttttatcataaaatacaatcttttactttggctgtgcaattgatacctttatttttccttaaaatattgtaatagcatagatatatggtatatacttcctgcttgctgtgctgtcttataagaaatccagaaacatagaaacattatggcatttcccagttagtgtttaacaaagtctattagcagatcctagtgattataggataaataacaaacttaattatcagggttaatttaggattatcaaccatatgtttttcattgngaattatcagttggtctatagatggaaaatataagatgtataatgtattancttaaaaaatgctcttcanagagtgnctagaattatagaatttaaaaattttg

SEQ ID NO: 8589 - DNA, 433 bp, Homo sapiens
  misc_feature (1)...(433): n = g, a, c or t
cctcaaccaagagggttgatggcctccagtcaagaaactgtggctcatgccagcagagctctctcctcctccagcaggcgccatgcaagggcaggctaaaagacctccagtgcatcaacatccatctagcagagagaaaaggggcactgaagcagctatgtctgccaggggctaggggctcccttgcagacagcaatgctacaataaaggacacagaaatgggggaggtgggggagccctatttttataacaaagtcaaacagatctgtgcgttcattcccccagacacacaagtagaaaaaaaccaatgctgtggtttctgccaagatggaatattcctcctcctanttccacacatggcgtttgcaatgctcgacagcattgcactgggctgctgnnntctgtgttctggcaccagtagcttgggccccat

SEQ ID NO: 8590 - DNA, 319 bp, Homo sapiens
cctgtgaagtacagtcagaagtacagatggatgaaagaagaaactggcaaagaactgagtggaaggccctgtgaactgggggactcgtggtggaaagctaggccacctcaccctacattcgaccttgaaagacgcagtgtttggcctgctgccctgaagcccacacgtttaccagtggtgcagtgccagcagcatcttgtgagcccctctgaagccaaatgctggcttccctgggggaacaaagtaaagctcctgtttgacaagcttcagacagaggcagtgtctgtgctgccagggagagcccaggctcaggagatgg

SEQ ID NO: 8591 - DNA, 208 bp, Homo sapiens
ctgcagcggctgtgtgtgctgctggatgtttacctggagaccgagagccatgacgacagtgtggaggggcccaaggaatttccccaggagaagatgtgtctgcggctcttcaggggtcctagcaggatgaagccatttaaatacaaccatcctcagggattcttcagccatcgctgatctcccgcgcagaccgttgtttcccccaagg

SEQ ID NO: 8592 - DNA, 597 bp, Homo sapiens
cctcagttgtcacttccacaaaagaggataataaagtactaccatacaaggtcacagtgaggatgaagggcagttcttaacatggcagccaacacacagtaagtgctccctttaagctattcattccaattcttatccagaaagataaccagtaaggactagaaatgtggtcatataaattatgtacagagctgttttcccctcatacttaacccctgcccttgaactcagcaatgagcgagccctcaggggctgtctctgcggggctgcacatgaactgcttgcgtgtataacttgtataacctcccaacgtgcctctcacaatgcatgaggcaggagctctggaactatcagctcccaactcctcaagcccaaagtgaagaaaattcaaaacagtacatatgactgtcaatggtcttcattcatttatatccatattaaaattagtttgcatttcttttacatgtatcttttgatggatgtcagaagaaaattattcagagatttaaaagtgacacagataagccactaaatagataacagataacatagatgagaaatgaaacaactatatgtatattctgaggagttagttaa

SEQ ID NO: 8593 - DNA, 332 bp, Homo sapiens
  misc_feature (1)...(332): n = g, a, c or t
cttgnnttggtaatctacngcctgttanggataggnggagggatgaantccttaaaactaaattgttcctctacgnatcttcgacctgagcctgcngagagagtanccccaaatccatctctctgctgaaaggncgcctgttttggtaggtgtgaggacattccgaaacacggncatccacattctgatacatatttaatcttatgttgatttcaccatgtggctgctcctgcttcanaacttctgcagtgtcccaggacttcttgctgnctttgtgttacccttgnccttgnttttcccaggcatnctctgnggngggntttccctctgcg

SEQ ID NO: 8594 - DNA, 358 bp, Homo sapiens
ggttccctgcccacagaccttccaggagaatgacctgagcaccttctttcccttcatctttgaagaagaacctatcttcttcgacacatgggataacgaggcttatgtgcacgatgcacctgtacgatcactgaactgcacgctccgggactcacagcaaaaaagcttggtgatgtctggtccatatgaactgaaagctctccacctccagggacaggatatggagcaacaagtggtgttctccatgtcctttgtacaaggagaagaaagtaatgacaaaatacctgtggccttgggcctcaaggaaaagaatctgtacctgtcctgcgtgttgaaagatgataagcccactctacag

SEQ ID NO: 8595 - DNA, 583 bp, Homo sapiens
ctgcagttccaggtcctgaagttccattcggactgaatttctcaaaccctggagctgatcaacttcaaacctctcctcctcagtcatatgatgataaaccatggtttgctgacgcagcattgccaattctaaatccatcatttgtgttctaaacaaattcaggctccgcctcattacctggagctcctgaaaagtattttcataaagaggtagaacagatgatttctgagtactatatggagcagcagcaggatcaggtcctctcatcatagggtacttcaaaaaagtaaaagtaggattaaaaccaatgttaaagtgaatacttccaaatcacttaaggggttaaaaggcagaatttggggcctatatatttttctctttaagacaaaaggatccaaaaaaccttcatattgtaagcaggaaaaaagaaatcagttcccaatgactcgagcggccgcccgggcaggtccatggacaagctgaggaagatgctggttccctgcccacagaccttccaggagaatgacctgagcaccttctttcccttcatctttgaagaagaacctatcttctttgacacatg

SEQ ID NO: 8596 - DNA, 418 bp, Homo sapiens
ctgaaaggagagagctgactgtcctggctgatggacaggagatcctcttagcactaccctaaggcaggcagttgggcattggtgtagacaacaggaaagtccaggctatagccgtactcaaaaacctttctgttccctttctgccagccctagggattgagtccacattcagcacaggactctctgggtacagctctctttaggaagacacaaattgcatggtgaagtcagttatatcctggccgcctttggtccctcccaggaagacgggcatgttttctgcttgagaggtgctgatgtaccagttggggaactgggcagactcaaattccagcttgttattgatttctatcttgttgaagacaaatcgcttttccatcttcttctttgggtaatttttgggatctacactctccag

SEQ ID NO: 8597 - DNA, 272 bp, Homo sapiens
cctgctggttgatcccaaatccacgtagaacggttccaactgcagcggggaagatgggctggtttaaaataaaaaaccaggtattgtttcactggtgccagaacacccagctcttcctggtattatggggtctgcagaccaggtggaccccgggaataggcaggggctatagtcgcattttcagaaggtgatctggagccatggaaaatgccctactctctggcagttctaccagccaccctcagaccacagcttccctgaaggctgtgcag

SEQ ID NO: 8598 - DNA, 252 bp, Homo sapiens
ctggcttcccacttcttggtacccggttaactgccaggtgggtgacagtgatgccaggctcgcccactactgcactggacacaacctcaccaatgccaccttcataataatggtcctccacggtgaggatcctgcccttggtggcacgagcgctgtcgagaatgagttttctgtccaggggcttgatggtgaaggggtccagcacgcggatgttgatcttttctttcttcagcagttcggcagcggccaagg

SEQ ID NO: 8599 - DNA, 287 bp, Homo sapiens
ctggtattttgcctaagatctatttaagataaccttttcttatattttttacttaatattgggcataatcgtatcattcaagattaagtctgggttatttctttgataagaactgaatgtggccgggcgcagtggctcacgcctgtaatcccagcactttgggaggccgaggtgggtggatcacaaggtcaggagatcgagaccatcctggctaacacggtgaaaccctgtctctactaaaaatacaaaaaatattagctgggtgtggtggcgggtgcctgtagtcc

SEQ ID NO: 8600 - DNA, 270 bp, Homo sapiens
  misc_feature (1)...(270): n = g, a, c or t
ctgcgggggctgcacgctctggagctccgtgaagttgttctcggcgaagctctcgaactcgctgtgcacgtggtgggggtggaagtcccagtaatggtcgctatggctctccccatcactgctgagataggggtaatactcgtgcgtttgncntnggtatagatccgtgtcatagggcaccangtcttctgatggaggggggacnaggggaaacccttccattttgcacgcctgtaacatccagccgggctccnagtcggtcagatcccc

SEQ ID NO: 8601 - DNA, 327 bp, Homo sapiens
ctgagttgctttaccttatcccacctggctcttacgcagtctgttccaagtgagaagttagcagagtcctgtaaacaaagaacagttcaggggccaacctgcgctcccaggtgccaggatgctctcagggtcttcactgtgctcccaggtgccagggtgctcccatggtcttcactgtgctcccagacacttggcttcattgttctcattttgatcctcatttggcatctctaaacgcaggcggtgcagggaatgcacaaagaagcgaggaagtttgcagaccaagttgagttcctccttcccggaccccagggcaggcaggatcag

SEQ ID NO: 8602 - DNA, 549 bp, Homo sapiens
ccgcgcgctgcacaatggcggctctgaagagttggccgtcgcgcagcgtaacttcattcttcaggtacagacagtgtttgtgtgttcctgttgtggctaactttaagaagcggtgtttctcagaattgataagaccatggcataaaactgtgacgattggctttggagtaaccctgtgtgcggttcctattgcacagaaatcagagcctcattcccttagtagtgaagcattgatgaggagagcagtgtctttggtaacagatagcacctctacctttctctctcagaccacatatgcgttgattgaagctattactgaatatactaaggctgtttataccttaacttctctttaccgacaatatacaagtttacttgggaaaatgaattcagaggaggaagatgaagtgtggcaggtgatcataggagccagagctgagatgacttcaaaacaccaagagtacttgaagctggaaaccacttggatgactgcagttggtctttcagagatggtagcagaagctgcatatcaaactggcgcagatcagg

SEQ ID NO: 8603 - DNA, 201 bp, Homo sapiens
ggatgccgccatccagagggcagaggtccaggtcctggaaggagcacttcatctgtttagggccatcagcttcaaagaacaagtcatcctcattgccactgtaataagccatcatttcactggcgagctcaggtacttctgccatggctgcttcagacacttgagcaatgaagattggctgaagagaatcccagagcagcc

SEQ ID NO: 8604 - DNA, 556 bp, Homo sapiens
  misc_feature (1)...(556): n = g, a, c or t
ccaccatccttgggaccgcctgcctggccttacctccttcttgcccattcagatgcactggtaccgggccacccaccaggaagccatcaactgctatgccaatgagacctgctgtgacttcttcacgaaccaagcctatgccattgcctcttccatcgtgtccttctacgttcccctggtgatcatggtcttcgtctactccagggtctttcaggaggccaaaaggcagctccagaagattgacaaatctgagggccgcttccatgtccagaaccttagccaggtggagcaggatgggcggacggggcatggactccgcagatcttccaagttctgcttgaaggagcacaaagccctcaagacgttaggcatcatcatgggcactttcaccctctgctggctgcccttcttcatcgttaacattgtgcatgtgatccaggataacctcatccgtaaggaagtttacatcctcctaaattggataggctatgtcaattctggtttcaatccccttatctactgncggagcccanatttcanaattgccttccaggag

SEQ ID NO: 8605 - DNA, 587 bp, Homo sapiens
ctgtgttggtagtaagtgttttgggtataaggtataaaacagaaattagatcagaaaagtgcagggggaagaccactgccaaagagtaatctccaagaacttggtattttccaccgtgaggcagatactgtggggtcatcgctaagtggtttgagtatctgaagccactcattaagatactcaacaagacctaatgcatctgggatgttgtccccttctgaaacaaatttcagcagaactgccatttggatttctttagaacagctttcatcatagagtgtttttgtgatacctcctcccggaatgcggatacaaaactcggaatcatctatttcaggaatgcaccggcttttttccatttcttcccagttaaggctctttattttattttgaacacttttttgcatggaaggtgtaagtaggtaccggaagggagtactacgaagctgcagatcattacgctgatatgaatgactgcttgaaagaacaatgactctggcacagccactgcttttcacccaggaaagcagtttttcacagaatggctttgatttatacttaataaaaatggatcttaactgtagagc

SEQ ID NO: 8606 - DNA, 499 bp, Homo sapiens
  misc_feature (1)...(499): n = g, a, c or t
ccttttggggataaaacagtttctcttaagtggtgaaaaagctacattttgttctttcagtctaatcttgttttctgctatgattttcttgcgctgttccagataaggtccaaaacttggcagtttcttgtccatgagttcagctatacgtggaactggtttccctttctggtgactcacagtanctggactctgtccatcccagncttgtanttcttcaatgcttttcanataaagcagggctttgaggccagtgcagtagtcttcgatcacagtgaaatcctgattctgaatggcactgcatacctggaggacggaagcaccactatggagaaactgaagaccactttcagcagagtcaattccaccagtagccaaaatgggaaatccaggcagagcacgagcaatggaggtcacagctctcaaagcaataggtctgattgctgtcccagacactnctccatatgtagttcgctttgcaatccccactgntggccaa

SEQ ID NO: 8607 - DNA, 550 bp, Homo sapiens
  misc_feature (1)...(550): n = g, a, c or t
ccatatcatgtaccaaaagttgctgaagtttctcttctagctggtaaagtaggagtttgcatgacttcacactttttttgcgtagtttcttctgttgtatgatggcgtgagtgtgtgtcttgggtaccgctgtgtactactgtgtgcctagattccatgcactctcgttgtgtttgaagtaaatattggagaccggagggtaacaggttggcctgttgattacagctagtaatcgctgtgtcttgttccgccccctccctgacaccccagcttcccaggatgtggaaagcctggatctcagctccttgccccatatcccttctgtaatttgtacctaaagagtgtgattatcctaattcaagagtcactaaaactcatcacattatcattgcatatcagcaaagggtaaagtcctagcaccaattgcttcacataccagcatgttccatttccaatttagaattagccacataataaaatcttagaatcttccttgagaaagagctgcctgagatgtagttttgntatatggntccccaccgaccatttt

SEQ ID NO: 8608 - DNA, 93 bp, Homo sapiens
ccaatctgtcaggagcagaagtgacagggcatttaaacaccactaagagatcctctgattctccttgcccatcagctcagcacctcagaccag

SEQ ID NO: 8609 - DNA, 222 bp, Homo sapiens
  misc_feature (1)...(222): n = g, a, c or t
gaaaanntgggaggtnaactttcctctgaagataaggagaccatggaaaaagctgtanaanaaaagatngaatggctggaaagccnccangatgctgacatngaagacttcaangctaanaanaaggaactggaagaaattgttcanccaattatcagcaaactctatggaagtgcangccctcccccaactggtgaanaggatacagcananaaagatgag

SEQ ID NO: 8610 - DNA, 592 bp, Homo sapiens
  misc_feature (1)...(592): n = g, a, c or t
ctgaagacaagggtacagggaacaaaaataagatcacaatcaccaatgaccagaatcgcctgacacctgaagaaatcgaaaggatggttaatgatgctgagaagtttgctgaggaagacaaaaagctcaaggagcgcattgatactagaaatgagttggaaagctatgcctattctctaaagaatcagattggagataaagaaaagctgggaggtaaactttcctctgaagataaggagaccatggaaaaagctgtagaagaaaagattgaatggctggaaagccaccaagatgctgacattgaagacttcaaagctaagaagaaggaactggaagaaattgttcaaccaattatcagcaaactctatggaagtgcaggccctcccccaactggtgaagaggatacagcagaaaaagatgagttgtagacactgatctgctagtgctgtaatattgtaaatactggactcaggaacttttgttaggaaaaaattgaaagaacttaagtctcgaatgtaattggaatcttcacctcagagtggagttgaaactgntatagcctaancggnttgtttactgcttttcattagca

SEQ ID NO: 8611 - DNA, 499 bp, Homo sapiens
  misc_feature (1)...(499): n = g, a, c or t
ccttttggggataaaacagtttctcttaagtggtgaaaaagctacattttgttctttcagtctaatcttgttttctgctatgattttcttgcgctgttccagataaggtccaaaacttggcagtttcttgtccatgagttcagctatacgtggaactggtttccctttctggtgactcacagtagctggactctgtccatcccagtcttgtagttcttcaatgcttttcagataaagcagggctttgaggccagtgcagtagtcttcgatcacagtgaaatcctgattctgaatggcactgcatacctggaggacggaagcaccactatggagaaactgaagaccactttcagcagagtcaattccaccagtagccaaaatgggaaatccaggcagagcacgagcaatggaggtcacagctctcaaagcaataggtctgattgctgtcccagacactcctccatatgtagttcgctntgcaatccccactgctggccaa

SEQ ID NO: 8612 - DNA, 590 bp, Homo sapiens
  misc_feature (1)...(590): n = g, a, c or t
ctgaaaaagagtgatcctcaatatcctaactaactggtcctcaactcaagcagagtttcttcactctggcactgtgatcatgaaacttagtagaggggattgtgtgtattttatacaaatttaatacaatgtcttacattgataaaattcttaaagagcaaaactgcattttatttctgcatccacattccaatcatattagaactaagatatttatctatgaagatataaatggtgcagagagactttcatctgtggattgcgttgtttcttagggttcctagcactgatgcctgcacaagcatgtgatatgtgaaataaaatggattcttctatagctaaatgagttccctctggggagagttctggtactgcaatcacaatgccagatggtgtttatgggctatttgtgtaagtaagtggtaagatgctatgaagtaagtgtgtttgttttcatcttatggaaactcttgatgcatgtgcttttgtatggaataaattttggtgcaatatgatgtcattcaactttgcattgaattgaattttggttgnatttatatgtattatacctgncacgcttctagttgctt

SEQ ID NO: 8613 - DNA, 591 bp, Homo sapiens
  misc_feature (1)...(591): n = g, a, c or t
ctgacacaggctgcaaacaaatgtcctctcatcctcaccgcaatccctacaagctgctcacctcctgttgccatgtggatgtgtcctgagtggcccacgcagatttctacacttgatcccctcgcttgaaataaaaggagataaagtgagtacaaacacccttatgtattactgtagctcaaacgaggccagactagatcctaaagaagacctggcgtgggccatcttctagagtcatcccacctcccaggacaagcaaaggtcctgcctccaagtcattgcaacttatatgacacagcaaggcaatatagactctgggggaaaaagttttttaactacagtatttttaaaatagaacattattttgaaattacttcgacatctactgtcaggtgacttgtaaaagcgcttgtatgttaaatgctctacattaggagattattttgttcttgagtccctacagagaattccttgggaatgaagtgctattgngcattcagaattatgtggctatagccatattgcaggccgggaactcaggaatgtcccctctgtcccagctcttcaagttgggccctacagatcccacgg

SEQ ID NO: 8614 - DNA, 394 bp, Homo sapiens
cctactatgggtgttaaattttttactctctctacaaggttttttcctagtgtccaaagagctgttcctctttggactaacagttaaatttaccctggctcaacaaaagggctggggattggccctgaaaggagagagctgactgtcctggctgatggacaggagattctcttagcactaccctaaggcaggcagttgggcattggtgtagacaacaggaaagtccaggctatagccgtactcaaaaacctttctgttccctttctgccagccctagggattgagtccacattcagcacaggactctctgggtacagctctctttaggaagacacaaattgcatggtgaagtcagttatatcctggccgcctttggtccctcccaggaagacgg

SEQ ID NO: 8615 - DNA, 558 bp, Homo sapiens
  misc_feature (1)...(558): n = g, a, c or t
ccaagggctaagagagaagagattgcatttaagataccctttggagtctggaaagcacctggatttcttgggagaggagcctggatttcttgggagaggagggctgtggaagccccaatcagttcttcttcgttttgggagtgtcatatttcctcttgctggagtaccacaatagcagggggatgccgatggagggaagggtcatgaccccaaaggctgcccagtccagaaaatgaggggagaatcgcctgtcaaactcccgctgagccaggattcctccctgtccaggtgcactggtagagccaatcacaacgggcccatcctcctgggccaggtaagtaattgttgccgaggtgaagttgaaataaccagccttgagagggcgcaggaccacagtgtgggagacattgctagcaggggcaatccggtcccatttgacattgagcattccagacacaatgccaaagtcttctggagggaaggaatcatcagatagttccacgtctaatgcancacttgagccaacattgtagatgttgtactgcaaggtcaggtctc

SEQ ID NO: 8616 - DNA, 420 bp, Homo sapiens
  misc_feature (1)...(420): n = g, a, c or t
ctgttcttctttttgttcctgacatttcagctcttcttctaaatgtctgtcttcttgaaggctggaaattaccttcttctcatgaccagaatccaaagagatttctaaatcccactttttctttcttttcagttctttacgtattgtcacccagagaacagtgttcactaaaaacattattcccactgccagatagaaaaggacatgaaaccagacaggagttggtaactggaggccaagcacttgaagctccaactcagggctgcgcttaaggacatttccatcctctgtggcagcctcgcaccantataacccagagtcttctcttctagcagttagtatttggtattcagaggatgtgttcctgcctcgcggggtcttgctgcccatgtanaaggagaagtaaagctgcaaaccagg

SEQ ID NO: 8617 - DNA, 183 bp, Homo sapiens
cctttctgtttgatgcctgctcgggaggttggcttcagctccaggctttcctgatccgtggcatccaggatcttgtacttgcttttcctcttgggttttcctttttgcctcttacaacaacagatcacagtccaagacaggattcccaaggcaacaacaatgacaaaggtagcaatgataaca

SEQ ID NO: 8618 - DNA, 307 bp, Homo sapiens
gtcctggcagatgctctcaagagtatcaacaatgccgaaaagagaggcaaacgccaggtgcttattaggccgtgctccaaagtcatcgtccggtttctcactgtgatgatgaagcatggttacattggcgaatttgaaatcattgatgaccacagagctgggaaaattgttgtgaacctcacaggcaggctaaacaagtgtggggtgatcagccccagatttgacgtgcaactcaaagacctggaaaaatggcagaataatctgcttccatcccgccagtttggtttcattgtactgacaacctcag

SEQ ID NO: 8619 - DNA, 411 bp, Homo sapiens
ctgggcaagaaatgcctcaggaggtttttatttttcctcttcagatagatgttgcttcctgccaattgcatcctgtacccactgttccttctggattccatgatttaccatccagcagggcttttctgagtcgtctccagaagatgtgccgccccaggacactgtcctcccactccaggtaagtgttcctgctgagaaggcggtacagctccacctgctgcctgagcagggtcttctccaccttctgcaggacaatgaagatgataccagcacgactgctcagaaactgccaggtctgagcaatctcatattcaaagatacaccagcggctctggatgaagtgctgggacaccacaacaatcacctttcggcttttatggaaaccttcatggatgatgttggcagcaatgg

SEQ ID NO: 8620 - DNA, 399 bp, Homo sapiens
ccatgtctagagccagacttggactttatatcttcgccagagtatccctcttccaaaactgttttgaactgactccagctttcagtcagctcacagctcgcccccttcatttgcatataattccaacagaacctttcccaactactagaaagaatggagagagaccatctcatgaagtacaaataataaaaaatatgccccagatggcaaactttgtatacaacatgtacatgcatttgatacagactacacatcattatcatcagactttattacaactaccacctgctatggtagaagagggtgaggaagttcaaaatcaagaaacagaattggaaacagaagaagaggccatgactgttcaagctgacatcatacccagtccaacagacaccagat

SEQ ID NO: 8621 - DNA, 252 bp, Homo sapiens
ccttggccgctgccgaactgctgaagaaagaaaagatcaacatccgcgtgctggaccccttcaccatcaagcccctggacagaaaactcattctcgacagcgctcgtgccaccaagggcaggatcctcaccgtggaggaccattattatgaaggtggcattggtgaggctgtgtccagtgcagtagtgggcgagcctggcatcactgtcacccacctggcagttaaccgggtaccaagaagtgggaagccag

SEQ ID NO: 8622 - DNA, 546 bp, Homo sapiens
  misc_feature (1)...(546): n = g, a, c or t
ctggtgtcaagacctgggttagaggtttgtcaaacagaggcagggcccagtcacctctttggaggggagtgatgagaaggggattttggtcacctgagagggttgagtaaacttggatcagggcacaggcttctctcaccatactcagctttttgcactcactccctagttgagcctactggcatcaagctctagatgccaaggctgggatggctgtggagcaggagctatggcccaagtagctctgagaggggaagagacctaaaacccctagcagggaaaatactgacgctaggtgtgaacatatcctctcttttcacaagagtcctgatggggctggctgagcttttgggtactcatccctactgttatagctggagaggatttgggtattgaagcagggaggggcagatcccacgaagtgactgcagatctggaataataagtaaggggtagatctgcccatagagctcactttanaccggcctatactcctacaaggaattggggtaggatcttntactcagccttgccacaatagaatgg

SEQ ID NO: 8623 - DNA, 443 bp, Homo sapiens
  misc_feature (1)...(443): n = g, a, c or t
agtgtaantcccaaaaattacccaaagaagaagatggaaaagcgatttgtcttcaacaagatagaaatcaataacaagctggaatttgagtctgcccagttccccaactggtacatcagcacctctcaagcagaaaacatgcccgtcttcctgggagggaccaaaggcggccaggatataactgacttcaccatgcaatttgtgtcttcctaaagagagctgtacccagagagtcctgtgctgaatgtggactcaatccctagggctggcagaaagggaacagaaaggtttttgagtacggctatagcctggactttcctgttgtctacaccaatgcccaactgcctgccttagggtagtgctaagaggatctcctgtccatcagccaggacagtcagctctctcctttcagggccaatccccagcccttttgttgagccagg

SEQ ID NO: 8624 - DNA, 252 bp, Homo sapiens
ctgcccagtgagtgtgtgaggggctggtctgtttaactgcttgccctgaaggtgcgaggagagcctgttcgccttgcatccagtgggccaagcttacatagatcccatctcctctgcataccctcagcatcctgatctataaaatgggagtgaatatagcaccttcagccacaccaccagcctgcctgcggcccctgcctcctgcccggcctcctctgaggtcagtgccttcagctcctgctgcactggtgg

SEQ ID NO: 8625 - DNA, 383 bp, Homo sapiens; identical to SEQ ID NO: 7515

SEQ ID NO: 8626 - DNA, 495 bp, Homo sapiens
  misc_feature (1)...(495): n = g, a, c or t
cctggccggcttgatgggactcctggagaaagggcttgggggtcccgagcttctcgatcctcttggaggaatgggggtagtctttcctttgatgctgctgtggccctagcccgggaccgccaaaggactgaggctcaaggagttcggcgaacccagacctgtactgagggtggggattactgcctcatccccagaacctccccttgtagcatgatctctgcccattctcctcggccccttagctgcctggagctcccatctgaaggtgcagaagggtctggatcccggagtcgtcttantctgccccccagagaaccccaggttcctgaccccctgttgtcctctcagcgcagatcatatgcatttgaaacacaggctaaccctgggaaaggtgaaggactgtgattaggaccacagccctgggcaaaggggaccagcaagttgtcttgaatctccagggttcctgactagctgtctcctctgcagcatgagcag

SEQ ID NO: 8627 - DNA, 569 bp, Homo sapiens
  misc_feature (1)...(569): n = g, a, c or t
ccatcttgagtcttggtgggcttggcaagtaaggagacattgaccagattcaaagcttccagaggtggtgagaactccagggccgagtaatggagagtacaaaggtccttcttggcccccatgacccttccaagccaagaacttggcagtagctgtgagaagcagagatagggagaggaggtgaggggcacctatagctcttagccatgagttatgactccctccatccaagggagacccaaggacatgaaaggggactcagttccaaggatcagagggaacttgggttgttttgggataatgactgtggcttgggatgtcacggagatgaacaccagaattggtgtgcaacagatgagctccagtacccctgatagtttgcatgggttttgctctgctgatgatggtcagggacagcagtgaggccctctacaatgccgccttctgcctaaacacaggcagtgcccacaaaaggggagctgtcattatggagcctaggaatggatagtcagagagcagcggctgggcagtgcaactcctgcattggacaangtcctggctagagaatg

SEQ ID NO: 8628 - DNA, 398 bp, Homo sapiens
  misc_feature (1)...(398): n = g, a, c or t
tacaagcttttttttttttttttttttttttttttttagggaagtttatttcanaaccattgaacagtatgatatttgctcatttataaatattcccatttaaataatctgagcttatatattttcagtgttaattaaaggacttgatttaaaganagcncaccagtccaaattgaattgattccatagctnttaaaaactaggctcttttacanacactgntacttnttgccccctttgaataaattanaccaatgaataaaacaaacaaacaaataaataaataaatagggaagcggttgctcatcaaaatgngggagcgaatgacanagggtttcttaaaaccaaatgtggccgnggtttntgtcaggngggctttaagtgagtagganaggtga

SEQ ID NO: 8629 - DNA, 558 bp, Homo sapiens
  misc_feature (1)...(558): n = g, a, c or t
ccagtggaatgatgttccctgcaattaccatctcacctatacgtgcaagaaaggaacagttgcttgcggccagccccctgttgtagaaaatgccaagacctttggaaagatgaaacctcgttatgaaatcaactccctgattagataccactgcaaagatggtttcattcaacgtcaccttccaactatccggtgcttaggaaatggaagatgggctatacctaaaattacctgcatgaaccgtaagtggtcctttagaaagaatggactaccgtgctataacaactactagacaccttcattttacggctgtggtatcggcagtttagggtatggagcaagtaatattgngtgttttctttttttctttctttccttccatgtagcatctgcataccaaaggacttattctatgaaatactttaaaaattcctcatcagcaaaggacaattcaataaatacatccaaacatgatcatcgttggagccggaggtggcaggagtcgaggcgctgatccctaaaatggcgaacatgtgttttcatcatttcagccaaagt

SEQ ID NO: 8630 - DNA, 589 bp, Homo sapiens
  misc_feature (1)...(589): n = g, a, c or t
ctgggaagccacgagaatattgtgaacctgctgggggcgtgcacactgtnaggaccaatttacttgatttttgaatactgttgctatggtgatcttctcaactatctaagaagtaaaagagaaaaatttcacaggacttggacagagattttcaaggaacacaatttcagtttttaccccactttccaatcacatccaaattccagcatgcctggttcaagagaagttcanatacacccggactcggatcaaatctcagggcttcatgggaattcatttcactctgaagatgaaattgaatatgaaaaccaaaaaaggctggaagaagaggaagacttgaatgtgcttacatttgaagatcttctttgctttgcatatcaagttgccaaaggaatggaatttctggaatttaagtcgtgtgttcacagagacctggccgccaggaacgtgcttgtcacccacgggaaagtggtgaagatatgtgactttggattggctcgatatatcatgagtgattccaactatgttgtcaggggcaatgcccgtctgcctgtaaaatggatggcccccgaaagcctgtttgaaggca

SEQ ID NO: 8631 - DNA, 453 bp, Homo sapiens
gtacaactagaggaaagcggaagagggttgatgtggaagaatcagaggcgagtagtagtgttagcatctctcattccgcctcagccactggaaatgtttgcatcgaagaaattgatgttgatgggaaatttatccgcttgaagaacacttctgaacaggatcaaccaatgggaggctgggagatgatcagaaaaattggagacacatcagtcagttataaatatacctcaagatatgtgctgaaggcaggccagactgttacaatttgggctgcaaacgctggtgtcacagccagccccccaactgacctcatctggaagaaccagaactcgtggggcactggcgaagatgtgaaggttatattgaaaaattctcagggagaggaggttgctcaaagaagtacagtctttaaaacaaccatacctgaagaagaggaggaggaggaagaagcag

SEQ ID NO: 8632 - DNA, 553 bp, Homo sapiens
cgagcagacacattccgaatactaaaattccttaggaaaattagtcattgcccatgtgtgatagctgttttccattttgaattttaaccattttgggaaaaggaagagaatgggaaataccagtatagtccgaaaagcccttaaaaaatgagtgcgaaaagtggaagggtggagtggacataggaagatgatgaacttgtcattttttcctttccatagcttcattttattgtgtcaaagttgcagaaagcacttcactttcatcgaggctctttttaggcagggtacagccaagaaaacttttttatggctcagatgtaaatcctagaaaacgtagtagaaatgatggcaggatctctaactgtaaaataacagtagtgttagtagtaagtgtcattataataacgttatagaactctgcacatcaaaaataccacattttatcatgatctctgcaagagatttctgttggtagtcattctagacttctaataaataatacgttgagtaggaaaggttctgtgaggatccaaataataatgaaaatgacagt

SEQ ID NO: 8633 - DNA, 356 bp, Homo sapiens
cctttcaccacaactcggatgtggatcacgcccttttgtttagctctcgccgctgcggctatgcctgctgtctgtgctgcgatgcctgtgcccttcttggcattccgaaatccctctgtgccacaggaagcaaaggcaaggggctcattactagcagagactacctggatctgtgtgttgttgtgggatgctttaatgtgtgcaattgggatctcctcaaatttctttcctgcccacctcagagagctctcctctcctgaacttggtgtggctgggagccgcgttctgttcaactttctgcttggccgcagcgtcttggagctgtcgagcgcctgtgcagatggtcccggccggcg

SEQ ID NO: 8634 - DNA, 244 bp, Homo sapiens
gctcacctcactaaccagtatatgcagagaatggcaagtgtacgagctgttcccaaccctgtaatcaacccctaccagccagcacctccttcaggttacttcatggcagctatcccacagactcagaaccgtgctgcatactatcctcctagccaaattgctcaactaagaccaagtcctcgctggactgctcagggtgccagacctcatccattccaaaatatgcccggtgctatccgcccag

SEQ ID NO: 8635 - DNA, 435 bp, Homo sapiens
  misc_feature (1)...(435): n = g, a, c or t
ctgaaacttatttttatattcattccataaatactgatcacatatctttttctgggtgcttagagtacattaaagaacaaaacaaagattgctgccctcttgtagcttatactctgataaggaaaaacaagcaataaatacaagtgaattttatagtatattaaatgatgatgagtgctttgaaaaaattgaaaggtagatcaggataatcggggtgggataagcattatatgtagcgggtttttttggttggttttttttttttttggtttttgnntttttgagatggagtctcgctctgttgccnnggtatagtggcacnatctnagctcactgcaacctccagctccctggttcaagtgattatnctgcctnagcctcccgagtngctgggattacaggcacatgcctccatacccagctaatttttgtatt

SEQ ID NO: 8636 - DNA, 552 bp, Homo sapiens
ctgagctttgtgaccagtgccagggtttatgaaacattatacatctaaaaaaaaaaaagtaaaaaaagaggcatttaacaataatcagacacatccacacattaaaactgatttccactgctgatttatacattatctagttgtttaaaaatcgcaatcaacatcccaacatctttttaagagtacaatgggcaaagatcaaagacagataaataataatataataaattagagcatgtaatacatcctatgggaattgctgaatcaacattattttccattggggggtatatatttttggtttatctttatcttttctgctgttattttttttctctgcttgataaaatggggctcattcctaaagccagcttgctgagacactaatttcagaagctcacttgtcacttgtttaacctctgagaatactcaggaacacatggttcccagcagcttgggctgggtctttatggaagtgaaatgcacatagatgaacacacgcactcacgtgcgcacacacaccacacacacacacagacacgcagtcacaca

SEQ ID NO: 8637 - DNA, 509 bp, Homo sapiens
  misc_feature (1)...(509): n = g, a, c or t
ccacaagctgatggttactagaactaggngtctgaagtttaaaattctacacnataaaatatctaaaaaatttgtgtcacagaatttcaatagcaattaaattcangaaaagatattcaaatgtcttaatagcaattaccanataataaaaagttattgnaaaagaaaacctttgngttacagattttcactgaattcagacttataaagaattatgcaaatgtatgtaagagtaattattgattaatagattaacagtatttaggaaaaccctatgatgtcataaaagttaatggaaactgtatacgattacagtaagtaataaaattatgtnataaatctttccatactaaaattgttgttttcaaanaagtgaacttcattgttaacattgcgggcacaaagagtttcatcttctgaccangatggacaccaattttgcatttttttctggatgaaagatttcaaacatgtcccagttttcacatcataaagntgtangttgggta

SEQ ID NO: 8638 - DNA, 515 bp, Homo sapiens
ccacaagctgatggttactagaactaggtgtctgaagtttaaaattctacacgataaaatatctaaaaaatttgtgtcacagaatttcaatagcaattaaattcaggaaaagatattcaaatgtcttaatagcaattaccagataataaaaagttattgtaaaagaaaacctttgtgttacagattttcactgaattcagacttataaagaattatgcaaatgtatgtaagagtaattattgattaatagattaacagtatttaggaaaaccctatgatgtcataaaagttaatggaaactgtatacgattacagtaagtaataaaattatgtcataaatctttccatactaaaattgttgttttcaaagaagtgaacttcattgttaacattgcgggcacaaagagtttcatcttctgaccaggatggacaccaattttgcatttttttctggatgaaagatttcaaacatgtcccagttttcacatcataaagttgtaggttgggtatcccag

SEQ ID NO: 8639 - DNA, 351 bp, Homo sapiens
  misc_feature (1)...(351): n = g, a, c or t
ctgatggttactagaactaggtgtctgaagtttaaaattctacacnataaaatatctaaaaaatttgtgtcacanaatttcaatagcaattaaattcaggaaaagatattcaaatgtcttaatagcaattaccagataataaaaagttattgtaaaagaaaacctttgtgttacagattttcactgaattcanacttataaagaattatgcaaatgtatgtaagagtaattattgattaatagattaacagtatttaggaaaaccctatgatgtcataaaagttaatggaaactgtatacgattacagtaagtaataaaattatgtcataaatctttccatactaaaattg

SEQ ID NO: 8640 - DNA, 249 bp, Homo sapiens
  misc_feature (1)...(249): n = g, a, c or t
aaaggcanngccctggtacctgacagtgtaaagaagganctcctacaangaatnanaacattccttgctcagcatgccagcctttaagattgaattanattgtgttgntgtggntttatttctgaaagtaaaacttgccataaattagaaaacaatttcccaaaataaaatccttttttgtatgatggtatacagttttcagtaatgatgtatacattgtattgatttttttcccntaaatgngttatt

SEQ ID NO: 8641 - DNA, 257 bp, Homo sapiens
  misc_feature (1)...(257): n = g, a, c or t
ctgggactgaaaccccgcacgcagccgccggagtttccaaactgcgatcccttctcacccaaagaaacaaggggagtatgatccatgatcaacaacatgctaaagttaaacaagaaaatggtacaaaatagaaattattaccatacatgtccagcatgcaggattaatatttttaatgcagattttttgtattnttctatataatcgagcaggcaataaaactgatgagatttgggcgccgagcgtcctaactgagg

SEQ ID NO: 8642 - DNA, 376 bp, Homo sapiens
  misc_feature (1)...(376): n = g, a, c or t
ctttgacctatatttggtgtggcttctatcctatgaaaagggaattgagtgttttgactcgtcgtttcccacctgttgggcctgtctgtaggtataccttctaaaatcaactgacatctccattttgctacagagtagcaaaaatcaacaatttttaagcatactaatggtgtgcatttgatctgaaccttcttgatgctatcatgtttcanctgtgaatatagcctgtcanatgcttagaacaatcagttgaactggtatgagtggctgcattanggctttacaaatcgnnaggactgaattttggtgggtttagagagtgcatttttatagctgagtngaatgnnatgagttcactacaggcttttggcaaagg

SEQ ID NO: 8643 - DNA, 542 bp, Homo sapiens
  misc_feature (1)...(542): n = g, a, c or t
ttggtctanagctttataaggccattcagcgagggaccatcaagtgcaactttgcgggggttgccttgggtgattcctggatctcccctgttgattcggtgctctcctggggaccttacctgtacagcatgtctcttctcgaagacaaaggtctggcagaggtgtctaaggttgcagagcaagtactgaatgccgtaaataaggggctctacagagaggccacagagctgtgggggaaagcagaaatgatcattgaacagaacacagatggggtgaacttctataacatcttaactaaaagcactcccacgtctacaatggagtcgagtctagaattcacacagagccacctagtttgtctttgtcagcgccacgtgagacacctacaacgagatgccttaagccagctcatgaatggccccatcagaaagaagctcaaaattattcctgaggatcaatcctggggaggccaggctaccaacgtctttgtgaacatggaggaggacttcatgaagccagtcattancattgtggacganttg

SEQ ID NO: 8644 - DNA, 382 bp, Homo sapiens
  misc_feature (1)...(382): n = g, a, c or t
cctgaatctgatgcaccgtcttctgctcgtgccatggtttttgtttttgttttttcttaattgagtcatctttacttaaaaatgctaatttccagcttcacttgtaagatcagaatatctgaaaacactttacacttattccaaaatgactccaactggttggagctaagtanaacttagagcctatgatgattaattttatgtgttgatttgactgggctaangggtgcccanatagctgggaaaacaatatctntgggtgtgcctgtganggcgtttctnnaacaggtgttaatnagtngactgantaaagaanatccaccctnaccaatgtgaataggcctcatccagnccattgagggctcaaataaaacaaacaggc

SEQ ID NO: 8645 - DNA, 554 bp, Homo sapiens
  misc_feature (1)...(554): n = g, a, c or t
ccaagatggttggggcataccttggttttatacattttagggagacataagacattaatcaatatatgtaagaagaacattggttcagtggggagggagcttccaggtcacagataggtgagacacaaacagttgcattcttttgagtttctgattagcctttccaaaggaggcaatcagatatgtatctatctcagtgagcagagagataactttgaatagagtgggaggtgggtttgccctaagaagtttccctaagcttgagttttccttagtgattctggggccccaagatattttcctgtcacagttgacatccccaacacagtgtttagggctcagaaaaagataccctaaaatagggtgctttggcatgctgaatgctttgaataaaggaggctgaagggcctcagaaataagagaacaaaggtctgtctctgacccactgctgcccacctcccttcccttccaaagcacagggagggattttctttgaagttctcttatttgattaagggaanntttctccanaaggaaggnaattgtcctggaca

SEQ ID NO: 8646 - DNA, 260 bp, Homo sapiens
gaggttgcggtgagctgagactgcgccattgcactccagcctgggcaacaagagcaaaactccgtctcaaaataaataaataaataaataaataaataaataaataaataaatataaataaaagtagtgggttgatacggtccaatttatttgtcagagatcaccgtggctcttgggtagagaatggatttgaagctggcctaacctagaattggacagacaaaatgggaggctgttgcagtaatctagatggtggatgg

SEQ ID NO: 8647 - DNA, 269 bp, Homo sapiens
ctggccgtctggtgctcgctggtcctgtccttctgccgcctgcacaaacagtccagcatgacggtgatggaagctcaggagagcccgctcttcaacaacgtcaagctacagcgaaagcttcctgtggagtcgatccagattgtattagaggaactgaggaagaaagggaacctcgagtggttggataagagcaagtccagcttcctgatcatgtggcggaggccagaagaatgggggaaactcatctatcagtgggtttccaggagtgg

SEQ ID NO: 8648 - DNA, 491 bp, Homo sapiens
ccaggtttaaagccatcaacaagagatggtatagatctttcattgtctgagtttgagaagagaatcaattccttgttgatgaaatcattataagtcaaatgctttgttgcagtaccatataaaaattgctctggtaagccatgtagcctacgctgtctccggtcttccataaaatttgttaaccattcttttctgtcatcaatcttcttcttactaaatgccaaggtaatggcagcatcatcttcaggaccagcatatctaaacaagatgcgatgcctttccatatcagcaaaatattcctttgcttctttagctgtactagtacccaatcctttatagtactttattttccaggctttctggttttctatatgttttttccattcgtcaaattcaggaatactgtagaaggaaagttcctgcttatttttgcttgcctttacaataggagtaatgaactcttcaagaaaaccatgcttcaaaagtgatgg

SEQ ID NO: 8649 - DNA, 397 bp, Homo sapiens
ccactgtgtagcaccttctaattcaatttcatcggcagttgtaataacagttccagcctcaggtgttttaatggtgggaaacatcttgattgcttctccagaaacttgaccataggttttgttttggaaatcttggagaatctcagttccttccacagcaataagttctgtgggagaagcttccatttcttctaataactcaggtttaccatcatcttctgaaggttctaattttgtgtcaggagataaagagggaggctcagttatgtgaaggtattcctcacttgatggtttgaaagtcgcttcaatatttacatgaatttccttaaaagaatcctgtggggacattacagatgagccgacgtctattcctggcagagcactgggctgggggatc

SEQ ID NO: 8650 - DNA, 546 bp, Homo sapiens
  misc_feature (1)...(546): n = g, a, c or t
ctgggagagctagactaagttggtcatgatgcagaagctactcaaatgcagtcggcttgtcctggctcttgccctcatcctggttctggaatcctcagttcaaggttatcctacgcagagagccaggtaccaatgggtgcgctgcaatccagacagtaattctgcaaactgccttgaagaaaaaggaccaatgttcgaactacttccaggtgaatccaacaagatcccccgtctgaggactgacctttttccaaagacgagaatccaggacttgaatcgtatcttcccactttctgaggactactctggatcaggcttcggctccggctccggctctggatcaggatctgggagtggcttcctaacggaaatggaacaggattaccaactagtagacgaaagtgatgctttccatgacaaccttaggtctcttgacaggaatctgccctcanacagccaggacttgggtcaacatggattagaagaggattttatgttataaaagaggattttnccaccttgacaccaggcaatgtagttagcata

SEQ ID NO: 8651 - DNA, 386 bp, Homo sapiens
  misc_feature (1)...(386): n = g, a, c or t
catgatgcacaagctactcaaatgcagncggcttgtnctggctcttgccctcatcctggttctggaatcctcagttcaaggttatcctacncanagagccaggnaccaatgggtgcgctgcaatccanacagtaattctgcaaactgccttgaagaaaaaggaccaatgttcgaactacttncaggtgaatccaacaagatcccccgtctgaggactgacctttttccaaagacgagaatccaggacttgaatcgtntcttcccactttctgaggactactctggatcangcttnggctccggctccggctctggatcangatctgggagtggcttcctaacggaaatggaacaggattaccaactagtagacnaaantgatgctt

SEQ ID NO: 8652 - DNA, 488 bp, Homo sapiens
  misc_feature (1)...(488): n = g, a, c or t
ggttggggcataccttggttttatacattttagggagacataagacattaatcaatatatgtaagaagaacattggttcagtggggagggagcttccaggtcacagataggtgagacacaaacagttgcattcttttgagtttctgattagcctttccaaaggaggcaatcagatatgtatctatctcagtgagcanagagataactttgaatagagtgggaggtgggtttgccctaagaagtttccctaagcttgagttttccttagtgattctggggccccaagatattttcctgtcacagttgacatccccaacacagtgtttanggctcanaaaaagataccctaaaatagggtgctttggcatgctgaatgctttgaataaaggaggctgaagggcctcagnaaataagagaacaaaggtctgtctctgacccactgctgcccacctcccttcccttccaaagcacagggagggattttcttt

SEQ ID NO: 8653 - DNA, 493 bp, Homo sapiens
  misc_feature (1)...(493): n = g, a, c or t
ccatagaaagataactgctgtaagattcagtgttggtacattcacaccccattcttttttttttttttccccatcagtcaatcttatctggtaatgggatcattactgttatccagngccaatggtctcagtagtatttccattcaaaaataatttancttttanattaaggatttctctttttgttttattaaacattgaaaggtgggactttaaaaaatggtntaaatctanattttaaggattcttttnttacaaactgtctcagctttttacaanaaatgtttaaataccaaaatgctgctcanaaaatttaaagtttaattgcccgnggttattctactgtttctatcccaatgtgtgctcctctgtactgcgtgtgtaanacnctcagttcatctgaatgtttggatgggaagttttgtgttgagcctccaggcatagcactggaccagcccaggccgntgtggcaaaacgggagggganaatggga

SEQ ID NO: 8654 - DNA, 559 bp, Homo sapiens
  misc_feature (1)...(559): n = g, a, c or t
cctttaaaattccattatcttaggatgtttttaaatgattactttaaatgtgattatttcctaaaccacacaagagtaaaatagagcatttattgatggaataacaaaagtgcttttcttaaatattcttcaaaatacatttgtacaacttacaataatatatccaaaataactgtatatacaaaacattacctagttttaatgtatgtgcttttttccccaaaaattacaaagtaacttcttttttttttggcaaagttcaaccttaacagaggtgacaattttaaaggttggtttaagaaaatagaacctgagggaaattgacacgcaagagtcaatgacaagcaagagatttggaggaatatttttagtttgttaaattaaaaatgttttttagagtgatacttttcacattacaaaaataaaccaaaatgaagaaaaggtcactgtaaaatgatggaaaaaggatctgtagatttgcttttagtatttcaaatagccaacaatgcatgtcagaaaatgaatgcaagatcacaacagtcttgnatttactttgtat

SEQ ID NO: 8655 - DNA, 553 bp, Homo sapiens
  misc_feature (1)...(553): n = g, a, c or t
cttacatcattcttttaaaagtagtcttttattaagagtcaaaaattttatatttttgttttcgttggactaattctaaaatttaagttcctcttacggaatgttatcaaaaattatatagttatatgcttagaagtcttctattgattaagccatcaaacttaagtacatcaaaatttgtactttaaagtttaaattcttttttccttgtgaacataatcctataaactaaaattttcctggaccaagttatttttgtagtttactaatatacaattgatcaaaacaatataaagctatcgtaacatgtgaaagattatacaaattgtaaaaattttgttggaaatatgtcttaatgagatgattagggctgtttttcccaattcacatttccgtagggaaatattccttaaaactagaatgtggcatggcttancacatttcactctcattttgtttgatagatgtaaataccgagaaaatctgtttacataagtagatgaaaatgatagttttattgngcactgctactcaatttttaaaagcaatttct

SEQ ID NO: 8656 - DNA, 430 bp, Homo sapiens
  misc_feature (1)...(430): n = g, a, c or t
ccagcgacagcctggcctgggaatggactggcagctcatcactaaaatgactcctttcatggaatccactgttatgcagccacactgaccacagagcaactgaataggtgagcattggattgttgatgacaactcttcagcagaacaattgtgtgtttgaagggactgttttatgatgaaataactgttatttcctggagctaattgntgaatgacagtttgtcaactgtttaaatgaatttcatttgaattaacaattatacagccactcagaggtcctacattcgccagagttggcatccanttgatgggttcatttnaattaaatggtttggaggctaacgtgattttttaaattgaatttcatnactattctgngtattctatttatcactatnctaaatgactcatggntggntaattgattatc

SEQ ID NO: 8657 - DNA, 309 bp, Homo sapiens
  misc_feature (1)...(309): n = g, a, c or t
ctggaatccncagttnaaggttatcctacncagagagccagntaccaatgggtgcgctgcaatccagacagtaattctgcaaactgccttgaagaaaaaggaccaatgttcnaactacttccaggtgaatccaacaagatcccccgtntgaggactgaccttttnccaaagacgagaatccagnacttgaanacgtatcttcccactttctgaggactacntctggatcaggcttcngntncggctccggctctggatcangatctgggantggcttcctaacggnaatggaacaggattaccaactag

SEQ ID NO: 8658 - DNA, 555 bp, Homo sapiens
  misc_feature (1)...(555): n = g, a, c or t
ctggtattttgcctaagatctatttaagataaccttttcttatattttttacttaatattgggcataatcgtatcattcaagattaagtctgggctatttctttgataagaactgaatgtggccgggcgcagtggctcacgcctgtaatcccagcactttgggaggccgaggtgggtggatcacaaggtcaggagatcgagaccatcctggctaacacggtgaaaccctgtctctactaaaaatacaaaaaattagccgggcgtggtggcgggcgcccgtaatcccagctactcgggaggctgaggcaggagaatggcgtgaacccgggaggtggaggttgcagtgagccgagattgcgccactgcactccagcctgggcgacagagcgagactgtctcaaaaaaaaaaaaaaaaaaaaggaacggaatgtactggagatgtatttgataaccaangttttaggtaaattttcaccagtattagttctatttgcaaactgaaaaatgttgtaggcttaatataaaataaccacattagngaacattatatctctt

SEQ ID NO: 8659 - DNA, 508 bp, Homo sapiens
gaaaagcagcttctaatgagccaataaaaaatacaggatggcaatcaccatatcttgaagaaaactctgctgtaaattgtaataaggcatctccttcattttctgcgttttctggcactaaaaaacaaacaaaagaaaaaacaaaaacaaaaaaacaaaacaaatagacacaaaaacaaaccacataacatctaatcccacatataagaaatatattcaatcaataaagaggaaataaaattaaattttagcttctgtgatatatctgaggggatagtttaactcaacatatattagatctcatcaaaccagaatcaaaaagaaccttaaaatattccaagctcataaattttgaaaaaccaatggacacaatcctgctaagcatttaaaatatgtgcccagttgtcatttaggatttcaatgttttcttgaaatagacatcttgtgactaaattatattaaatgggtctgatattattttaaagacttcattaattggggaaaataa

SEQ ID NO: 8660 - DNA, 449 bp, Homo sapiens
ctgggagagctagactaagttggtcatgatgcagaagctactcaaatgcagtcggcttgtcctggctcttgccctcatcctggttctggaatcctcagttcaagaaagacgagaatccaggacttgaatcgtatcttcccactttctgaggactactctggatcaggcttcggctccggctccggctctggatcaggatctgggagtggcttcctaacggaaatggaacaggattaccaactagtagacgaaagtgatgctttccatgacaaccttaggtctcttgacaggaatctgccctcagacagccaggacttgggtcaacatggattagaagaggattttatgttataaaagaggattttcccaccttgacaccaggcaatgtagttagcatattttatgtaccatggttatatgattaatcttgggacaaagaattttataga

SEQ ID NO: 8661 - DNA, 95 bp, Homo sapiens
  misc_feature (1)...(95): n = g, a, c or t
actacttccaggtgaatccaacaagatcccccgtntgangactgacctttttccaaagacgagaatccaggacttgaatcgtatcttnccanttt

SEQ ID NO: 8662 - DNA, 600 bp, Homo sapiens
gttaggagttcctcatggacctcgaagatgtgtggttccccaggccattgagctccataaagagaaggttgtttgtattgctgctggactgaggcatgcagtagctgctacagcgagtggcatcgtgttccagtgggggactggtttggcatcatgtggacgacggttgtgccctgggcagactcttccattgtttttcacagcaaaggaaccaagcagagtgacaggtctagagaattctaaagcaatgtgtgttcttgctggctcagaccactcagcttcattaacagatgcaggagaggtgtatgtttggggaagcaacaagcatgggcaactggctaatgaggctgctttccttcctgtgccccagaaaatagaagcacattgtttccagaatgaaaaggtcactgccatctggagtggatggacacacctggttgctcagacagaaactggcaagatgtttacctggggccgagcagactatggtcagctagggaggaagttggagacttatgaaggctggaaactagaaaagcaagattcatttctcccctgttcaagaccaccgaacagcatgccttcatctccgcattgctt

SEQ ID NO: 8663 - DNA, 252 bp, Homo sapiens
  misc_feature (1)...(252): n = g, a, c or t
gtgagctgngactgngccatngcactccancctgggcaacaagagcaaaactccgnctnanaataaataaatnaataaataaataaataaataaataaataaatataaataaaagtagtgggttgatacggnccaatttatttgtnanagatcaccgtggctcttgggtagagaatggatttgaagctggcctaacctanaattggacagacaaaatgggaggctgttgcantaatctanatggtggatggt

SEQ ID NO: 8664 - DNA, 517 bp, Homo sapiens
  misc_feature (1)...(517): n = g, a, c or t
ccaatgggtgcgctgcaatccagacagtaattctgcaaactgccttgaagaaaaaggaccaatgttcgaactacttccaggtgaatccaacaagatcccccgtctgaggactgacctttttccaaagacgagaatccaggacttgaatcgtatcttcccactttctgaggactactctggatcaggcttcggctccggctccggctctggatcaggatctgggagtggcttcctaacggaaatggaacaggattaccaactagtagacgaaagtgatgctttccatgacaaccttaggtctcttgacaggaatttgccctcagacagccaggacttgggtcaacatggattagaagaggattttatgttataaaagaggattttcccaccttgacaccaggcaatgtagttagcatattttatgtaccatggttatatgattaatcttgggacaaagaattttatangaaatttttaaacatctgaaaaagaagcttaagttttatcatcctttttt

SEQ ID NO: 8665 - DNA, 565 bp, Homo sapiens
caaggttatcctacgcagagagccaggtaccaatgggtgcgctgcaatccagacagtaattctgcaaactgccttgaagaaaaaggaccaatgttcgaactacttccaggtgaatccaacaagatcccccgtctgaggactgacctttttccaaagacgagaatccaggacttgaatcgtatcttcccactttctgaggactactctggatcaggcttcggctccggctccggctctggatcaggatctgggagtggcttcctaacggaaatggaacaggattaccaactagtagacgaaagtgatgctttccatgacaaccttaggtctcttgacaggaatttgccctcagacagccaggacttgggtcaacatggattagaagaggattttatgttataaaagaggattttcccaccttgacaccaggcaatgtagttagcatattttatgtaccatggttatatgattaatcttgggacaaagaattttatagaaatttttaaacatctgaaaaagaagcttaagttttatcatccttttttttctcatgaattcttaaagg

SEQ ID NO: 8666 - DNA, 399 bp, Homo sapiens
agtgaccaggcagtttttctgcctttagctttgacagttcttaattaagatcattgaagaccagctttctcataaatttctctttttgaaaaaaagaaagcatttgtactaagctcctctgtaagacaacatcttaaatcttaaaagtgttgttatcatgactggtgagagaagaaaacattttgtttttattaaatggagcattatttacaaaaagccattgttgagaattagatcccacatcgtataaatatctattaaccattctaaataaagagaactccagtgttgctatgtgcaagatcctctcttggagcttttttgcatagcaattaaaggtgtgctatttgtcagtagccatttttttgcagtgatttgaagaccaaagttgttttacag

SEQ ID NO: 8667 - DNA, 327 bp, Homo sapiens
ccatgaactctatcaagtacagtaccctgttggagagtgagaaaaatactttcatggaaatctggaagaagagatgggataagttcatagcagatgtggctacaaagtgaggagaagctagccagccctctacaagctgtcttcttgcacacgctgtcacttcctctcactcgttcttgaatcagctccatgtgcccatgaaatcaatggcctctgtatggagcgaccctgtgagaagcacttggctggctgagcaaattcatcctctggaaatattctctctcagccacagtgacattgaccctcttggttttctcctctctctgg

SEQ ID NO: 8668 - DNA, 415 bp, Homo sapiens
ctgctggctctatcttctagataacattaacgacgtacggggaggagcccaggatagcaccataaactccctgcatgagatcaatagctatggtgtgccaccctgttcactggcacgctgtgctaaatgaagggcacgatgttcacagttccgtacccacgacttcgctttttccctaaagagcgatctcatgcctgcctagagtcctaaccactcgggaggctgaggtaggaggatcacccaagcccagaaggtcgaggctgcagtgaactgtgattacgccactgtgctccagccagggtgacaaagcgagaccccgtctctatttaaattaaaagaaaaaaaaaagtaactttaacttccattatttactctacccaatgcattatctacccattagggagacatctagttt

SEQ ID NO: 8669 - DNA, 449 bp, Homo sapiens; identical to SEQ ID NO: 8036

SEQ ID NO: 8670 - DNA, 530 bp, Homo sapiens
  misc_feature (1)...(530): n = g, a, c or t
accaaaaggttnacagacttggaattttgttccattatataactgagatcattatctaatccctgctctttacataaaactttatgtggttcattttatggtaaggcttnctacgaaataataaaacaatctttttctatagaatttgtggaactagtatttttattttcctgtcatgtcttgccttttctgacttctgtcatacacacaaacacacacacacacagagatacatgtgtatgtttgtttggcaacataggagggacaagcttagtttctcgtattctacgtgtcttataagatcatggtttgctatgtttacagatttatccccttctattagagtacccgaagttcttttaaaatatacaagatgttttcctactggtatgacatccctgaagtacttgtctttctttagttttattcttttagaacaagaaggaaaaaaaaacccgagaaataacctttaaagttttttaaaaattactttgtaagagatgtaagttgaatctcctctatataaagta

SEQ ID NO: 8671 - DNA, 500 bp, Homo sapiens
tctgaccatccatatccaatgttctcatttaaacattacccagcatcattgtttataatcagaaactctggtccttctgtctggtggcacttagagtcttttgtgccataatgcagcagtatggagggaggattttatggagaaatggggatagtcttcatgaccacaaataaataaaggaaaactaagctgcactgtgggttttgaaaaggttattatacttcttaacaattctttttttcagggacttttctagctgtatgactgttacttgaccttctttgaaaagcattcccaaaatgctctattttagatagtttaacattaaccaacataattttttttagatcgagtcagtataaatttctaagtcagcctctagtcgtggttcatctctttcacctgcattttatttggtgtttgtctgaagaaaggaaagaggaaagcaaatacgaattgtactatttgtaccaaatctttgggattcattggcaaataat

SEQ ID NO: 8672 - DNA, 509 bp, Homo sapiens
ctgcactgctggatgcttgcctggttcccagcctttaaggtttttagtctataagttcaacgttgttggaaaagtgctctgatacctgcagaggtgggagaaaggtgggggcagtcctctgctaggagatggaagggacaatcaaagcttagtagcttgagctggtcctggaagagcaagtaggagctctttagccagactaagagaagggcattcttggcagaaggaatattctatataaagaagtggagtcagggaacagtagggctctttgaagaactacagattgtgttctaaatgaatgacatgtaaggtttgtaaggggcgagtgataaccactgatgaatggcagatggtgttgacaactaggcggggccagagtctgtaggatcttacatgtcttgcaatcagttttgactttgaccttggaacccagttgaggctcccttccgccccagttcctcatggcagggaaatacatcatgttgtgcgttgtaagacttcaaaac

SEQ ID NO: 8673 - DNA, 331 bp, Homo sapiens
  misc_feature (1)...(331): n = g, a, c or t
aatcaanatntaatttttttatttgtactgaaanactaatcataactgttaattctcagccatntttgaagcttgaaagaagagtctttggtattttgnnaacgttagcagactttcctgccagtgtcagaaaatcctatttatgaatcctgtcggtattccttggtatntgaaaaaaataccaaatagtaccatacatgagttatttctaagtttgaaaagtaaaaagaaattgcatcacactaattacaaantacaagttctggaaaaaatattnttcttcattttaaaactttttaactaataatggctttgaaagaagaggcttaat

SEQ ID NO: 8674 - DNA, 243 bp, Homo sapiens
cccaaccagattcctcatagagattcctaatcactagtttcttgtattcataaactcagagatacagagggcttggtttgaagttggggtgagatgaaacctttgctctgagccaaagctctggggccttgcattccctgcattgggttgatgactgtcagcatcactgccgcaggccatgcttgactaaggtacctggttttagccacagccacctccttgtatgttacctttcagctctgg

SEQ ID NO: 8675 - DNA, 497 bp, Homo sapiens
  misc_feature (1)...(497): n = g, a, c or t
ccaagcctcancctttggtccantgcancccttgcctngcttgncaacagtgaaaaattagtttggttagaagaaccatctggaaacacaccancttctgctaccttcatgctcattgttaaaaaaagattaaccagtgtgaacattctgatctgttaattccagggactgttttctttccaatggactgttngttggtagaataacccccaaaagctcaaagctaaaatgcatcatcantcctagtnggcagntccttaagaatggactggcggcgtggttganctgatatggaaaanctgcaccttcctgcagaagatcaactgacctgctatcccaccccaaatttcagcctgaggtatatttcagtgaaggcaggtagctgtgcttctcagagcagagaagcngttttaagagcaaaaaggtagaggaaatctagaaaagaaccgtcttgatacagatttatcccatggtgtgaagggagggcaaagaaccca

SEQ ID NO: 8676 - DNA, 540 bp, Homo sapiens
  misc_feature (1)...(540): n = g, a, c or t
gaaaagaaaaagacttaaattannacttgtngaaatgagtattacaatgactgaaatgaaaagtacactggatagggtgctgtggttcangcctgtantctcancnctttggaaggntgaggcgggcagatcccctgagtttgggagtttgagaccancctgaccaacatnngaganaccccatctctactgaaaatacaaaattacccgggtgtggtggcancatgcctgtaatctcagctactcgggaggctgaggcanaagaattgcttgaatctgggaggcggaggttgtggtgagccaagatcntgccattgcactccancctgggcaacaagagcgaaactncgtctcaaaaaattaantaaataaggcttatgtgcagntattctcaatgagctaaaaagcttcctgaggctagaaattcttgtcatttttggctgggagcagnggcttacacctgtagtttcagcattttgggaggtcgaggcgggcagatcacctgaggtcagggatttgagaccagcctgnacctnggcc

SEQ ID NO: 8677 - DNA, 406 bp, Homo sapiens
ccaattgaaacaaacagttctgagaccgttcttccaccactgattaagagtggggtggcaggtattagggataatattcatttagccttctgagctttctgggcagacttggtgaccttgccagctccagcagccttcttgtccactgctttgatgacacccaccgcaactgtctgtctcatatcacgaacagcaaagcgacccaaaggtggatagtctgagaagctctcaacacacatgggcttgccaggaaccatatcaacaatggcagcatcaccagacttcaagaatttagggccatcttccagctttttaccagaacggcgatcaatcttttccttcagctcagcaaacttgcatgcaatgtgagccgtgtggcaatccaatacaggggcatagccggcgc

SEQ ID NO: 8678 - DNA, 388 bp, Homo sapiens
  misc_feature (1)...(388): n = g, a, c or t
ctgcttcaggggaaggcttgtggcttatatctattttgttgtattcctntagttcaacatgtctgcccccacccttacttctaacacctctgcccactccagtattccctcagaacctagcctggtaacgaatatatggacaattaaattacatcccaacatcattcatactttaatatataagaaatcagagcagagaatcagggcagccagtccctgaaggaagagtctgtgacaaatcacaagtatgatcacagcacgaacttttctattctagcctggcctctangaagaaaacagagagtgttaccggacttaaggggaaaaaggacatgcttgatgaaggacagaaccccattgttctccacatttcctggctcacagaagg

SEQ ID NO: 8679 - DNA, 562 bp, Homo sapiens
  misc_feature (1)...(562): n = g, a, c or t
ccaatgaacacattacgtcctctgtatggtttttatcaagtaactgccccagtgctcccatgacgctgggcaggtccacttgttaggccagtgagggccatagttcgttggtaattaagtgttaacattgttacactcctttttatggttactggtgatctgatttccagaacaatttgttcactccagattatgatgatggcttttcaatgaagcatacagccaccgcccgtttccagagaaaccaccgcctcatcagtgaaattcttagtgagagtgtggtgccagacgttcggtcagttgtcacaacagctagaatgcaggtcctcaaacggcaggtccagtccttaatggttcatcaggtaaagtcataaaacattcatttcaataagatgtgcctataccacaaatcccaggtgatatgattcctacaccatgcctaaatctacctgttaaatatgtcaatctaacctgttcctgatttggagaagaggtttaaggaagtggacctttcccanatgtttaataagtttgncattaaaaactataatatagaaccttg

SEQ ID NO: 8680 - DNA, 345 bp, Homo sapiens
ccatcacagggactcacatgggagccttttaaaactccagatggtggctgagcacagtgattcatgcctgtcatcccagcactttgggaggccgaggccggtggatcacttgaggccaggagttcgagaccctcctgggcaacatggtgaacccgtctctactaaaaatacaaaaattagctgggtatggtgatacgcgcctgtaatcccagctactcaggaggctgaggcgggagaatcgcttgaacccgggaggcggaggctgcagtgagccagattgtaccacttcactccagcttgggcaacagagcaagactctgtcttggaaaaaaaaaatacagatgg

SEQ ID NO: 8681 - DNA, 562 bp, Homo sapiens
ctgggcttcattggtaagatgttcaagtcgctggacctgagcctgattgtagagttcattctcatgttctaccgggacaagcccatcgactggctcctggaccatattctgtgggtgaaagtctgcaaccccgagaaggatgcgaagcactgtgaccggcagaaagccaacctgcggatccgcttcaaaccgtccctcttccagcacgtgggcactcactcctcgctggctggcaagatccagaaactgaaggacaaagactttggaaagcaggcgctgcggaaggagcatgtgaacccgccagcagaggtgagcacgagcctgaagacataccaccacttcaccctggagaaagcctacctgcgcgaggacttcttctgggccttcacccctgccgcgggggacttcatccgcttccgcttcttccaacctctaagactggagcggttcttcttccgcagtgggaacatcgagcacccggaggacaagctcttcaacacgtctgtggaggtgctgcccttcgacaaccctcagtcagacaaggaggccctgcaggagggcc

SEQ ID NO: 8682 - DNA, 570 bp, Homo sapiens
  misc_feature (1)...(570): n = g, a, c or t
ctgaagggtacagccatttcatagggtcctctcagagagtatttggtttgctttcctaactttctaaaaatagtagattacacaggccacctccatctcatggctcaagaactcagaaaaggctggactatggatttaagcaatacacaggacacattttattaaagaagtcaggattattacaagttttctaaatttttttccgtttactctgtgagagaatgcaaatgatctagcggttaatggcatggaaacctcataacgctcccaaatttcagaacttcaagcatgagtcatacagttactttaacagttttaaaatatgtttttgatctattttagccacaagactgaatacaagaggactgctatctgaagggaaggattctaaatactgtacaaagaatcacatgtgtcagttataaatatatacacacacacgtaagaaacatgttttttaacataaatgcttaattacatattcaaaattgttttaatgcttaacataattattttactaacatttaanaagctactgtcctgggtatgaagctccatcataaataaatt

SEQ ID NO: 8683 - DNA, 454 bp, Homo sapiens
ccactaatgtgccatcttgagttggaaaacaagccccctccccccaaaaaaaaccctgccgctttggtgtcctatttatatatttttaaaaacattcattaaaaaaatcaaatctataataaaaatgtccctgtttgttttaaaaaagcattagtaggcatcccttatctactaaaaccatttgtttttcctaagatgcctggaagcagaaaagcgagtgagattaactcactgcgcaattaattaaaattagaattctttcctctaaacaacttccagagcaccagaaagaagaaggggccccatcaaagggagaaataaagcccttctgactcacaggagatgaaatgttcagccagagttctaacacattctggctgtcatcaaaagttctttattggattactcagaaaataactcaagtgctattttaaaaatgaaagatacaggcagc

SEQ ID NO: 8684 - DNA, 574 bp, Homo sapiens
  misc_feature (1)...(574): n = g, a, c or t
ccaaaaaaatcaagatttaatttttttatttgtactgaaaaactaatcataactgttaattctcagccatctttgaagcttgaaagaagagtctttggtattttgtaaacgttagcagactttcctgccagtgtcagaaaatcctatttatgaatcctgtcggtattccttggtatctgaaaaaaataccaaatagtaccatacatganttatttntaagtttgaaaagtaaaaagaaattgcatcacactaattacaaaatacaagtnctggaaaaaatatttttcttcattttaaaactttttaactaataatggctttgaaagaagaggcttaatttgggggtggnaactaaaatcaaaagaaatgattgacttgaaggtctctgtttggtaagaatacatcattagcttaaataagcannanaaggttagttttaattatgtagcttctgttaatattaagtgttttttgtctgttttacctcaatttgaacagataagtttnnctgcatgctggacatgcctcanaacncatgaatagcccggtactanatcttgggaacatggatctt

SEQ ID NO: 8685 - DNA, 592 bp, Homo sapiens
  misc_feature (1)...(592): n = g, a, c or t
gccagatgcaatacaagattcctggttaaatttgaatttcagtaaacaatgaatagtttttcattgtaccatgaaatatccagaacatacttatatgtaaagtattatttatttgaatctacaaaaaacaacaaataatttttaaatataaggattttcctagatattgcacgggagaatatacaaatagcaaaattgaggccaagggccaagagaatatccgaactttaatttcaggaattgaatgggtttgctagaatgtgatatttgaagcatcacataaaaatgatgggacaataaattttgccataaagtcaaatttagctggaaatcctggatttttttctgttaaatctggcaaccctagtctgctagccaggatccacaagtccttgttccactgtgccttggtttctcctttatttctaagtggaaaaagtattagccaccatcttacctcacagtgatgttgtgaggacatgtggaagcactttaagttttttcatcataacataaattattttcaagtgtaacttattaacctatttattatttatgnatttatttaagcatcaaatatttgtgcaagaat

SEQ ID NO: 8686 - DNA, 348 bp, Homo sapiens
tgaaggtcagggggtgctttgaccattccaaggagctgtatatgatgccccggaccatggtggaccctgtccgggaggcccgggagggcggcctcatctccttctcaactcagagtggggcctatgtggtcactcccttccactgcaccgacctgggagtcaccatcctggtaaatagagggttcgttcccaggaagaaagtgaatcctgaaacccggcagaaaggccagattgagggagaagtggacctcattgggatggtgaggttgacagaaaccaggcagccttttgtccctgagaacaatccagaaaggaaccactggcattatcgagacctggaagctatgg

SEQ ID NO: 8687 - DNA, 580 bp, Homo sapiens
  misc_feature (1)...(580): n = g, a, c or t
ataaagggaagttaaaagccagcagttccagtcagccatcaagctctgaaagtggctcatttctcctcaaatctggcacaacacccctgccacctggagcagccacttctccctccaagagcacaaatggagctcccggtactgttgttgaatcagaagaagaaaaagccaaaaaattactttattgttcactatgcaaagtggctgtgaactccctgtcacagctagaggcacacaacacaggttagcagctatcttttgcatttaaataatgtttataacaaaacccaacttttcccatcagaataccatatcttttgttgttcagaccttaggtttgttccatgcttntctacttttttgattcaaaggagtgattttagaaaagtatgatcatatgactttggaactagcaagacaaaagcagtttggagatcaaacttgttctattctttattttcttaaaaacatctaatactgtccaaaactcattttgatgaagtgacaaagatgaagataaatatttatgcacagtgttcactgcaatacacttaaaagagaaaaaaaatggaaacaacct

SEQ ID NO: 8688 - DNA, 300 bp, Homo sapiens
  misc_feature (1)...(300): n = g, a, c or t
ctgggactacaggcacctgccaccatgcctggctaaatttttgtattnntagtaganacagggtttcacnagtgttaaccaggatagnntcaatctnctgacctcatgatccgtctgctntggcctncnaaagtgctgcaattacaggcgtgagccactgcgnccagcccaaagtggttaatattaatatgctgagtacctnncatgtgccanacacataagatactgnatgttnctatttcatcaatggagaaacagaagtctgagtggggtnaaagaacgggctncccaatgtcacac

SEQ ID NO: 8689 - DNA, 485 bp, Homo sapiens
  misc_feature (1)...(485): n = g, a, c or t
cgccgcttgtgctgcanccatgtctctagtgatccctgaaaagttccaacatattttgcgagtactcaacaccaacatcgatgggcggcggaaaatancctttgccatcactgccattaagggtgtgggccgaanatatgctcatgtggngttgaggaaagcanacattgacctcaccaagagggcggganaactcactgaggatgaggtggaacgtgtgatcaccattatgcanaatccacgccagtacaagatcccagactggttcttgaacagacagaaggatgtaaaggatggaaaatacagccaggtcctagccaatggtctggacaacaagctccgtgaagacctggagcgactgaagaagattcgggcccatanagggctgcgtcacttctggggccttcgtgtccnaggccagcacaccaagaccactggccgccgtggccgnaccgtgggtgtgtccaanaagaaataagtctgta

SEQ ID NO: 8690 - DNA, 584 bp, Homo sapiens
cctgccctgtgacactcaatcacagttgacgtcaggatgggtacaatgtctgcaagagaaaaggggagagcagcaacagcacagtgtctgctgtcctcagtgatacaggcgggattccaccctggttctgtaggaaaacagggtcatggtctctgaactttgctttttctgcaaagaaccagatatgatctgtttaatgaggaaagtacgtagctgtggggtcaggctaactgcccatcaagtgcttttcctttgatgacaccatgttctgccttgtaacactaggacctgcaccccttgaggcaacacttccatgagtttcctttcatgcctcttagatattttttgcatctgacaggactgctgataaaagcattagggggattaatgactttatacactaatctctctgcaggcatcaaattctttcttcaggacagacacccagaattactggctcaaaaacaggaccttttaaaaaatactcttaccacaaattgccaaactgctttctgcaaaggccataccaatttccatccccaccagcagtcatgagagtgcctgtcctatcccataccttgccc

SEQ ID NO: 8691 - DNA, 641 bp, Homo sapiens
  misc_feature (1)...(641): n = g, a, c or t
ctgcacactgtatcattttcatttctctcccttgctgtcccctctgcctctgtccttgcctcccatcatatggacacactgtgcctgacacacacgctcacataatctctccctttttgtttccctagctactcatcaacctcaggtttgcaggaaaaaaacataagatgaaaagagaaaattgtgtgacagcaccataaataaaattaaagcgatataaaatgtgtaacagagaatgcacaatcaaaataacctaatattcagtgatactccattaacataaatagaccgtctcaaaactcaaagatgccaagtatctcagcaagatttactctctttagacgtaactcatgacaaggcactgggtaaaaactgtaatttgtgaatgccaaataatgacaaataacaaagtaaaatatgctaggtgcaaaaacactcttagtactgaatgaattgacaaagacaccctttatttcaataaccagccaggagaaccttccagccacggtgaagatacgaacgctcagcgagcaaacggtacttactgtgtgctgtggtccaagtaagtgattactctgtctccctcttccnntaagcgtttactnacatggttaagatattctggaaccttacaaacaaaa

SEQ ID NO: 8692 - DNA, 70 bp, Homo sapiens
  misc_feature (1)...(70): n = g, a, c or t
tcaggaanatcactngaccacnnaagatgaaagctgcagngagctanctntgattgcaccantgnacgcc

SEQ ID NO: 8693 - DNA, 359 bp, Homo sapiens
  misc_feature (1)...(359): n = g, a, c or t
taactatcacccttgtagatattacactaaattaaaacaatagtgatacaaattcccaccttaccaaaatagcaataatccaatttatttcctagtttatttaatcagattctcctaccaaccatctcctcttctattttttaaatcaattaaaataaaggcaagagaaaagctctagttttatgtatttcaaccatagcttggatgttatgttttcccttttcctatatacaaaaataanatttgctcacatctgcacttttggtttagaaaatacatctggcaatcttcagtgatagtgaaaataagaatgctaagatactagagaaccacacctaagcaccctttttgaaagcagg

SEQ ID NO: 8694 - DNA, 590 bp, Homo sapiens
  misc_feature (1)...(590): n = g, a, c or t
ccatatttattcattttccacacacttgaccatctactttgtataacacattctgctaaggcccagggatacaatggcaaacaagatagatgtagttccttcccttgtggcatgtcataagagaaacagatgtgcatatacacacaataaataagaaaattaataattgtattaagtggtatgaaaaaaagggggaggattgttcactcactgttacctgtgttagtatctgcaaatgcatgaatggttgaactcccatgtcagcatttttgttgccatttatttagtaccagacatagtgctggtctcacagcttaatatttggtaatgaataaattctgctagtggtatatgttgatctgaacttacaatgatgggatatagaattggcagagtggcagatgttcacaattgtctacaagtagatgtgctagacaatggaaggatgcaggccaacctctttgattacaattgagattcatgtgactattgagccctggaaatgtagcttgtccaaattgagatgtgctgtcagtataaaatacataccagattttaaagatgtnccaaaaaatgtaaactatctcaat

SEQ ID NO: 8695 - DNA, 536 bp, Homo sapiens
  misc_feature (1)...(536): n = g, a, c or t
gcatcccatgtgcntcgatgggcaaagtatttgtagcactgcccttggaatttgtgccagccatagtcacatgtctcggtatcttgctcacaaagtgcaccaacataacttggaaggcagaggcacctgaatgtgttaaaaccatcaacacaagtggctccattacgacagggattagagtgacattcatcaaaatcaagttcacactggtctccgctgnatcctggcacacaggtgcatacgtaggaagtttcagtaggataacaggtgcctccgttaaggcacgggttcattttgcagcgatcaggtcctggtaaatagattgccgtgccttccactgactcttcattaatgccaatcaggaaatctgtttcattagaagtctccagaagggaaaatggtggtgttgcaacctcagtattaaattccacagggtttactgntgcctgatcattggaatcaagaattctcgctgccacttgctgntctgatgctgctatcgtggaatcctgccctctgattaaagctgcttgagt

SEQ ID NO: 8696 - DNA, 595 bp, Homo sapiens
  misc_feature (1)...(595): n = g, a, c or t
cttttcttcctccaagtgaaggaaggaatccttagcgatgagatctactgcccccctgagactgccgtgctcttggggtcctacgctgtgcaggccaagtttggggactacaacaangaagtgcacaagtctgggtacctcanctctgagcggctgatccctcaaagagtgatggaccagcacaaacttaccagggaccagtgggaggaccggatccaggtgtggcatgcggaacaccgtgggatgctcaaagataatgctatgttggaatacctgaagattgctcaggacctggaaatgtatggaatcaactatttcgagataaaaaacaanaaaggaacanacctttggcttggagttgatgcccttggactgaatatttatgagaaagatgataagttaaccccaaagattggctttccttggagtgaaatcaggaacatctctttcaatgacaaaaagcttgtcattaaacccatcgacaagaangcacctgactttgtgttttatgccccacgtctganaatcaacaagcggatcctgcagctctgcatgggcaaccatgagttgtatatgcgccgcaggaagcctgaca

SEQ ID NO: 8697 - DNA, 234 bp, Homo sapiens
  misc_feature (1)...(234): n = g, a, c or t
cttgcncaaatattngatgcttaantaaatacataaataataaatanngttaatangttacacttgaaaataatttatgttatgatgaaaaaacttaaagtgcttncacatgtcctcacaacatcantgngaggtaagatggtggctaatactttttccacttagaaataaaggagaanccaaggcacagnggaacaaggacttgtggatcctggctancagactatggttgcc

SEQ ID NO: 8698 - DNA, 447 bp, Homo sapiens
ccacgtgacccccacctttctgagccaaagcacttaaaacacataataaacattcaaaaccatagcacttagaatcaggaagtccttttatcgtttttcacagtataaggcacttattttttgatatcattctctttttttaaaggcaaaggaattacaagtgaacacactagtcatggcccatcagaatgatagatgcttatctacaaaaacatttcctgacttcttgctgaacctcttgcctctgggaaatactgctgtttgcttacttaaaaagtggtgagaaattaatatgattctctcttcccttttaaaaaattaaatttgtataaatataaggcgtacaagtgcagttttgttacacggatatattgcgaagtggtgaagtccaggcttttcctgcaaccaacaccagaaaagtgtacactgtacccatcaggtactttc

SEQ ID NO: 8699 - DNA, 104 bp, Homo sapiens
  misc_feature (1)...(104): n = g, a, c or t
ctgtggactccancatgtttctgataattatgcnngcaacanttntgtancctcaagtaanaccacctgtgaactngannattatctggnccaaatatgaagat

SEQ ID NO: 8700 - DNA, 622 bp, Homo sapiens
  misc_feature (1)...(622): n = g, a, c or t
tccttttatattcccagaagtgggtttgctggatcatatggtaattctatttttagttttttgaggaacctctataccattttccatggtggctgtactaatttacattcccagcaacggtgtagaagagttcacttttctctgcattgttgctaacactgatctttcatctatttgagaaaatgcattctagcaggtgtgaggtaatctcattgtggttttaatttgcatttccctaatggctagtgctgctgaacgttgtttgcatgaacctggtatgtcttcttttgagaagcattttcacaagccattggtgaagtatgtggctcaccaccacccatactccagccctgttcccagtcactggtacctagagggtgagagtgaggctgctcatcaacgtgttctccaagtcataagctgctgctctcccactcacgatgcttggtgattcagtgatgttttccacttaaagacagtgatagctgtatcaccacagttaatagatgtctgatgtgtcccagtcacagagataatacaaatgtgaggaaatnatgctggtgcctgaaagcattggagaccatttgtaagaatgccatttggtagttaaagtgaacatgaa

SEQ ID NO: 8701 - DNA, 470 bp, Homo sapiens
ctgccccatacctggcaggatccagagggtgggccctgatggacaccagtctatcaggtcctccctgcaagatgctacagagtccttctccctcaacacatgtttggtgagcttggcacctacatgacacccggcttggagcactcgctgttcgtttcaaagtaactctccaggagtgaacacgggatgcttcgtggggtgtaggagatgcagcagtcagcactagtagcatggaatcctgcagcatgagaaagggtcatctgaggaccaatctttctcctccagagcatgtccagaagtactggattttccaatggaagctttgacatcatgaactctgtctctgcatcttttgtgacccgggcctgggatccaagggcagtaacaagcatgaggcaggagagggcagccacggagaccttcatcctcctggtgggcaggcagggctggccgaggactcctgggctcac

SEQ ID NO: 8702 - DNA, 547 bp, Homo sapiens
  misc_feature (1)...(547): n = g, a, c or t
gcaccctccgnttcctntcctaggcgacgagacccagtggctanaagttcaccatgtctattctcaagatccatgccagggagatctttgactctcgcgggaatcccactgttgaggttgatctcttcacctcaaaaggtctcttcagagctgctgtgcccagtggtgcttcaactggnatctatgaggccctagagctccgggacaatgataagactcgctatatggggaagggtgtctcaaaggctgttgagcacatcaataaaactattgcgcctgccctggttagcaagaaactgaacgtcacagaacaagagaagattgacaaactgatgatcgagatggatggaacagaaaataaatctaagtttggtgcgaacgccattctgggggtgtcccttgccgtctgcaaagctggtgccgttgagaagggggtccccctgtaccgccacatcnctgacttggctggcaactctgaagtcatcctgccagtcccngcgttcaatgtcatcaatggcggttctcatgctggcaacaagctggacct

SEQ ID NO: 8703 - DNA, 639 bp, Homo sapiens
ctgtctgtactagacaaggttaccaagtgcggaattggttaatactaacagagagatttgctccattctctttggaataacaggacatgctgtatagatacaggcagtaggtttgctctgtacccatgtgtacagcctacccatgcagggactgggattcgaggacttccaggcgcatagggtagaaccaaatgatagggtaggagcatgtgttctttagggccttgtaaggctgtttccttttgcatctggaactgactatataattgtcttcaatgaagactaattcaattttgcatatagaggagccaaagagagatttcagctctgtatttgtggtatcagtttggaaaaaaaaaatctgatactccatttgattattgtaaatatttgatcttgaatcacttgacagtgtttgtttgaattgtgtttgttttttcctttgatgggcttaaaagaaattatccaaagggagaaagagcagtatgccacttcttaaaacagaacaaaacaaaaaaagaaaattgtgctcttttctaatccaaagggtatatttgcagcatgcttgactttaccaattctgatgacatctttacggacactattatcactaagaccttgttatggcgaagtctttag

SEQ ID NO: 8704 - DNA, 586 bp, Homo sapiens
  misc_feature (1)...(586): n = g, a, c or t
caactgancgagtatctagatgccatgatgaatgaggctccaggccccatcaatttcaccatgttcctcaccatgtttggtgagaagttaaatggcacagatcctgaagatgtcatcagaaatgcctttgcttgctttgatgaagaagcaactggcaccatacaggaagattacttgagagagctgctgacaaccatgggggatcggtttacagatgaggaagtggatgagctgtacagagaagcacctattgataaaaaggggaatttcaattacatcgagttcacacgcatcctgaaacatggagccaaagacaaagatgactgaaataacttcaaattccagccaaacgttccttgttgccactttgggtattctgagattttctcttgcatgcccttagctttacagcttttgcatttcctgttgtatttattctcagccattttgggcatatgtatctttataatcagactggaaacgggactttctattaatatcattttcagaataaaaaataggataatttaacctaccagcccttctccnccaataactgnggnctatacagagtcaatatattttt

SEQ ID NO: 8705 - DNA, 386 bp, Homo sapiens
  misc_feature (1)...(386): n = g, a, c or t
cctatagaatagtgctcaagtatacggtntgctctnaaaaaaatgttagctgtggtttttattgtcttattataattagtaattctttcaaattaataatataagcttttacacacatatcataaaagttattaaaattattagagatattttgagtagtgacgctgaagaaagtaaaagtggaattcctaagtcatacttgaaagtatcaattatatttatagaagatcagtcctactttcaaccaccaagccagcaagaattgaaaaccaactggtcaacatatgtcgatgcagatggaaaaaggatacaactgtctttaaattccctaaagaaagctgagtggagagccttctggtcactgcagtccaacctatcattacgcg

SEQ ID NO: 8706 - DNA, 473 bp, Homo sapiens
ccagtggaatgatgttccctgcaattaccatctcacctatacgtgcaagaaaggaacagttgcttgcggccagccccctgttgtagaaaatgccaagacctttggaaagatgaaacctcgttatgaaatcaactccctgattagataccactgcaaagatggtttcattcaacgtcaccttccaactatccggtgcttaggaaatggaagatgggctatacctaaaattacctgcatgaacccatctgcataccaaaggacttattctatgaaatactttaaaaattcctcatcagcaaaggacaattcaataaatacatccaaacatgatcatcgttggagccggaggtggcaggagtcgaggcgctgatccctaaaatggcgaacatgtgttttcatcatttcagccaaagtcctaacttcctgtgcctttcctatcacctcgagaagtaattatcagttggtttggattt

SEQ ID NO: 8707 - DNA, 402 bp, Homo sapiens
ccaggctggtctcaaactcctggcctctagtgatctgcctgcctcggtctcccaaagtgggattacaggcatgaaccaccacgtccagccagtcattttcttaagtaggttcttcccagcctgcaaacccagtgaaagggcttattctttccccattactgtggggaaaaagtcctgtagaggctttccataggccctgtgtgactcacgtgtctatacctgaatcaactgttacaaccaagcagatgcagagactgcgtgccctctcctggagctaggagctaggtgagtcaatcctgcactttctctacaaggcttgcaaaggtgagcaagaagattccccaaagtgaaatcagggtgctgttaccaaaagaagctatgctggcaggcaaaaaacaacag

SEQ ID NO: 8708 - DNA, 481 bp, Homo sapiens
  misc_feature (1)...(481): n = g, a, c or t
tgaggactgacctttttncaaagacgagaatccaggacttgaatcgtatcttcccactttctgaggactactctggatcaggcttnggctccngctccggctctggatcaggatctgggagtggcttcctaacggaaatggnacaggattaccaactagtngacnaaagtgangctttncatgacaaccttangnctcttgacaggaatctgncctcanacagccaggacttgggtcaacatggattanaanaggatnttatgttataaaanaggattttcccaccttganaccaggcantgtagntagcatattttatgtaccatggttatatgattaatnttgggacaaannattttatagaaatttttaaacatctgaaaaagaagcttaagttttatcatncttttttttctcatgaattcttaaaggattatgctttaatgctgttatntatcttattgttcttgaaaatacctgc

SEQ ID NO: 8709 - DNA, 589 bp, Homo sapiens
  misc_feature (1)...(589): n = g, a, c or t
cctggccaacaacaccgttattgctaaagtaaataatgttgtgtgggacctggaccgccctctggaagaagattgtaccttggagcttctcaagtttgaggatgaggaagctcaggcagtgtattggcactctagtgctcacataatgggtgaagccatggaaagagtctatggtggatgttnatgctacggnncgccantagaaaatggatnctattatgacatgtacctcnaagaagggggtgngnctagcaatgatttctcntctctggaggctttgngtaagaanatcattaaagaaaaacaagcttttgaaagactggaagttaanaaagaaactttactggcaatgtttaagtacaacaagttcaaatgccngatnttgnatgaaaangngaatactccnactaccacagtctatagatgtggccctttgatanatctgtgncgggatcctnatgtnagacacacgggcaaaattaaggctttaaaaatacacaaaaattcctccacgtactgggaaggcaaagcagatatggagactctccagagaatttatggcatttcattcccagatcctaaaatgttg

SEQ ID NO: 8710 - DNA, 567 bp, Homo sapiens
  misc_feature (1)...(567): n = g, a, c or t
tgggagagctagactaagttggtcatgatgcagaagctactcaaatgcagtcggcttgtcctggctcttgccctcatcctggttctggaatcctcagttcaaggttatcctacgcagagagccaggtaccaatgggtgcgctgcaatccagacagtaattctgcaaactgccttgaagaaaaaggaccaatgttcgaactacttccaggtgaatccaacaagatcccccgtctgaggactgacctttttccaaagacgagaatccaggacttgaatcgtatcttcccactttctgaggactactctggatcaggcttcggctccggctccggctctggatcaggatctgggagtggcttcctaacggaaatggaacaggattaccaactagtagacgaaagtgatgctttccatgacaaccttaggtctcttgacaggaatctgccctcagacagccaggacttgggtcaacatggattagaagaggattttatgttataaaagaggattttcccaccttgacaccaggcaatgtagttagcatattttatgtaccatggnnatatg

SEQ ID NO: 8711 - DNA, 279 bp, Homo sapiens
  misc_feature (1)...(279): n = g, a, c or t
gggcattggtgtagacaacaggaaagtccaggctatagccgnactcaaaaacctttctgttccctttctgccagccctagggattgagtccacattcagcacangactctctgggtacagctctctttaggaagacacaaattgcatggtgaagtcagttatatcctggccgcctttggtccctcccaggaagacgggcatgttttctgcttgagaggtgctgatgtaccagttggggaactgggcagactcaaattccagctngttattgatttctat

SEQ ID NO: 8712 - DNA, 477 bp, Homo sapiens
gcgcctataatcccagctactggggaggctgaggcaggagaatcacttgaacccgggggacagaggttgtagtgagccaagatcgcaccactgcactccagcctgggtcacagagtgagactccatctcaaaaaaaaaaagagagagagagagaaagaaatagaagagaagagccatcttggcagggttattttatatctgagcaaggagtttaaatgagactagtttagattgtctgctgatgcagccgtccatagcagtacccctaaaatcccaccagaatacgggtccctctaacccagtggctggaagaaccactgtctagagcaacttttcttggaactgtcccagctaccaagtcagacaccaaggtttatgccaccaggtaacacgggaatcacaggtacatgtcgctccggtcagattagttggctttggcccctcgaccctgtgcaggagctagttctcagcttgcag

SEQ ID NO: 8713 - DNA, 494 bp, Homo sapiens
ccttatttctcttgtcctttcgtacagggaggaatttgaagtagatagaaaccgacctggattactccggtctgaactcagatcacgtaggactttaatcgttgaacaaacgaacctttaatagcggctgcaccattgggatgtcctgatccaacatcgaggtcgtaaaccctattgttgatatggactctagaataggattgcgctgttatccctagggtaacttgttccgttggtcaagttattggatcaattgagtatagtagttcgctttgactggtgaagtcttagcatgtactgctcggaggttgggttctgctccgaggtcgccccaaccgaaatttttaatgcaggtttggtagtttaggacctgtgggtttgttaggtactgtttgcattaataaattaaagctccatagggtcttctcgtcttgctgtgttatgcccgcctcttcacgggcaggtcaatttcactggttaaaagtaagagacag

SEQ ID NO: 8714 - DNA, 605 bp, Homo sapiens
ccagcgacagcctggcctgggaatggactggcagctcatcactaaaatgactcctttcatggaatccactgttatgcagccacactgaccacagagcaactgaataggtgagcattggattgttgatgacaactcttcagcagaacaattgtgtgtttgaagggactgttttatgatgaaataactgttatttcctggagctaattgttgaatgacagtttgtcaactgtttaaatgaatttcatttgaattaacaattatacagccactcaggggtcctacattcgccagagttggcatccagttgatgggttcatttgaattaaatggtttggaggctaacgtgattttttaaattgaatttcatcactattctgtgtattctatttatcactattctaaatgactcatggttggctaattgattatcatgtaagcaagctatttgaagaaattgattacatatatttatatatagggggtaactaattaatgattacttgattaaattgctatgtgaactgacaactatttataaatcaatgcaatagactgttgtttgaccaaattattttactgaactgacaagtgggtttttgatttgt

SEQ ID NO: 8715 - DNA, 572 bp, Homo sapiens
cctgcctcagcctcccaagtagctgggactacaggcatatgccaccacgcccagctaatttttgtgtttttagtacagacagggtttcaccgtgttagccaggctgatcttttgatccgcccacctcagcctcccaaagtgccaggaccacaggcgtgagccactgaacttggccgggacagctatttgtaaactagctatgtgaaaataaagggccatatccttggagtctagaattctcctttcactaagttatcaaaaattatattactttgaccacacaaaggtatttatctctggttcgtgcaaacactgaatgttggaagtaccgagtgataattggaaataaaaatctccaaacgtctagtaataaaaagactgatgggctaaattgtgtatttattcatacagaagattattagcctgttaaaaaacagtgagattttgtatagcaagatcacgggtttttttaatgaaaaaaatatgcatacaggtgtgtgcacatacctatatatttacttttttccccctctcactctgtgcccaagctggagtgtagaagcacactcatg

SEQ ID NO: 8716 - DNA, 420 bp, Homo sapiens
ctgtgacgcctgaataactgtctactttatcttcactgaaccactcactctgtgtaaaggccaacagatttttaatgtggttttcatatcaaaagatcatgttgggattaacttgcctttttccccaaaaaataaactctcaggcaagcatttctttaaagctattaagggagtatatacttgagtacttattgaaatggacagtaataagcaaatgttcttataatgctacctgatttctatgaaatgtgtttgacaagccaaaattctaggatgtagaaatctggaaagttcatttcctgggattcacttctccagggattttttaaagttaatttgggaaattaacagcagttcactttattgtgagtctttgccacatttgactgaattgagctgtcatttgtacatttaaagcag

SEQ ID NO: 8717 - DNA, 594 bp, Homo sapiens
  misc_feature (1)...(594): n = g, a, c or t
ccatcggtgctgaaattgagcattttaaatagtacagtaggctggtatacattaggaaatggactgcactggaggcaaatagaaaactaaagaaattagataggctggaaatgcttactttctgctctcattttctttcattttgtctgctgtctttttgaatgccaatactttcatttaaaatgttttgggagcacggcaacccaaaatgactgaacggtggtccaaaaatccaaaccaactgataattacttctcgaggtgataggaaaggcacaggaagttaggactttggctgaaatgatgaaaacacatgttcgccattttagggatcagcgcctcgactcctgccacctccggctccaacgatgatcatgtttggatgtatttattgaattgtcctttgctgatgaggaatttttaaagtatttcatagaataagtcctttggtatgcagatgggttcatgcaggtaattttaggtatagcccatcttccatttcctaagcaccggatagttggaaggtgacgttgaatgaaaccatctttgcagtggnatctaatcagggagttgatttcataacgagggttcatct

SEQ ID NO: 8718 - DNA, 608 bp, Homo sapiens
  misc_feature (1)...(608): n = g, a, c or t
cctccggtcacggttaaagccaagctgaggcttccactgccgtccattgctggatttttcccagtcactaggtttcagtactgctgctggctttcttgctcctggaagcattacagctttaaaaatgtaatcttcagcaaactgtgggtctttaaaattaatactgactacagtgttctgtgtcagatcccttaacataggaacaggagaacatactatttgatctggaagaatggcttcttcatccaaagaaaactttccttgaatcccatgacatagttcagggggtacctccactggctctgtggaacctgtctggtacagctctaaaatgaagtcatggagtgggtgatgtttccccacaaataagacatcacctccaaggctgtttcttctggtctcttctggagtgaggtctgggtatacctcttctagggcagctcgtagccttcgctcatccacgaatggcaagagagcaacaccttgccatgcatatttcttcccattcaaatcaatagcaaaatcttcaggatagaagtcaattatactagantcaggatcactcatgagcttccgccatgatggaggtagaaaattaccacttgcag

SEQ ID NO: 8719 - DNA, 517 bp, Homo sapiens
ctgtcctggcttggatacagctctggagtggtcaaaagagcgctctgtccctaatcatcaactctgctccaaaaaggaacctgaaaaaagctctaaactcacagatccaagaagcccagacattcccattgctgtcttcgaatgggattctaaagccagggggatgatgttttagggaatccttgaaactcctacaattataaacaggtgtgcatgaagaaaatacactaccatttaatgtcccaaacgccttataaggaaggtgaaggggacctagaaagccccttaagttcgcttagcatctcagtaagtggtctgagcatggaacagagtttgggagttgaagcaggagagacctgggttacactacaggtaaagaacatgggattttgaggcaactggggattaggaggtaaaaggaaaaggtgggagggggaagagtagaaccagtgaggtgctgtgaggctggagaccctgggaggtgaagcaggcaaggaagagtcccatgtcggggtgg

SEQ ID NO: 8720 - DNA, 454 bp, Homo sapiens; identical to SEQ ID NO: 8124

SEQ ID NO: 8721 - DNA, 456 bp, Homo sapiens
ctgaaaagaggacccaaaaagaaattggagatattgctggtgttgctgatgttacaatcagacagtcctatagactgatctatcctcgagccccagatctgtttcctacagacttcaaatttgacaccccagtggacaaactaccacagctataaattgaggcagctaacgtcaaattcttgaatacaaaactttgcctgttgtacatagcctatacaaaatgctgggttgagcctttcatgaggaaaaacaaaagacatggtacgcattccagggctgaatactattgcttggcattctgtatgtatatactagtgaaacatatttaatgatttaaatttcttatcaaatttcttttgtagcaatctaggaaactgtattttggaagatatttgaaattatgtaattcttgaataaaacatttttcaaaactgaaaaaaaaaaaaaaaaaaaaaa

SEQ ID NO: 8722 - DNA, 442 bp, Homo sapiens
  misc_feature (1)...(442): n = g, a, c or t
ctgtggccctgctcggattgagtatgcttgataggctttgggataagaagggacaaggtgcttctagccctgtctcagtccgttatcactctgctgtagaagggggacatgccacatgtattanaaggcatctgctgtaacttccagtgcaagataattcaataactgatgtcccatttcattcagagcccttattgctcttatcaaaacagaanaaggctacatttgtgggagtgttgtcatattctcaggccaactgttttgaaattcggtatctcactgagctaatctggaacaaacctctcacctcaggccanaaggggatgacctccatttgcttctctgagtagtttcctntgctgacattccaaatcccaccatcgattgtgcagcgctttggatttccttcagttctccaggtccacctggaaagtatagttgg

SEQ ID NO: 8723 - DNA, 545 bp, Homo sapiens
  misc_feature (1)...(545): n = g, a, c or t
cccccgtctgaggactgacctttttccaaagacgagaatccaggacttgaatcgtatcttcccactttctgaggactactctggatcaggcttcggctccggctccggctctggatcaggatctgggagtggcttcctaacggaaatggaacaggattaccaactagtagacgaaagtgatgctttccatgacaaccttaggtctcttgacaggaatctgccctcagacagccaggacttgggtcaacatggattagaagaggattttatgttataaaagaggattttcccaccttgacaccaggcaatgtagttagcatattttatgtaccatggttatatgattaatcttgggacaaagaattttatagaaatttttaaacatctgaaaaagaagcttaagttttatcatccttttttttctcatgaattcttaaaggattatgctttaatgctgntatctatcttattgttcttgaaaatacctgcattttttggtatcatgttcaaccaacatcattatgaaattaattagattcccatgg

SEQ ID NO: 8724 - DNA, 449 bp, Homo sapiens
  misc_feature (1)...(449): n = g, a, c or t
ctggagagtgtngatcccaaaaattacccaaagaagaanatggaaaagcgatttgtcttcaacaagatngaaatcaataacaagctggaatttgagtctgcccagntccccaactggtacatnagcacctntcaagcagaaaacatgcccgtcttcctgggagggaccaaaggcggncaggatataactgacttnaccatgcaatttgtgncttcctaaagagagctgtacccanagagtcctgtgctgaatgtggactcaatccctagggctggcagaaagggaacagaaaggtttttgantacggntatagcctggactttcctgttgtctacaccaatgcccaactgnctgccttagggtagtgctaagaggatctcctgtccatcagccaggacagtnngctctctcctttcagggccaatccccagcccttttgttgagccagg

SEQ ID NO: 8725 - DNA, 246 bp, Homo sapiens
gacaccgggtgtagagggcggtcgcggcgggcagtggcggcagaatgttggctaccagggtatttagcctagttggcaagcgagcaatttccacctctgtgtgtgtacgagctcatgaaagtgttgtgaagagcgaagacttttcgctcccagcttatatggatcggcgtgaccaccccttgccggaggtggcccatgtcaagcacctgtctgccagccagaaggcactgaaggagaaggagaagg

SEQ ID NO: 8726 - DNA, 568 bp, Homo sapiens
ccagtggaatgatgttccctgcaattaccatctcacctatacgtgcaagaaaggaacagtcgcttgcggccagccccctgttgtagaaaatgccaagacctttggaaagatgaaacctcgttatgaaatcaactccctgattagataccactgcaaagatggtttcattcaacgtcaccttccaactatccggtgcttaggaaatggaagatgggctatacctaaaattacctgcatgaacccatctgcataccaaaggacttattctatgaaatactttaaaaattcctcatcagcaaaggacaattcaataaatacatccaaacatgatcatcgttggagccggaggtggcaggagtcgaggcgctgatccctaaaatggcgaacatgtgttttcatcatttcagccaaagtcctaacttcctgtgcctttcctatcacctcgagaagtaattatcagttggtttggatttttggaccaccgttcagtcattttgggttgccgtgctcccaaaacattttaaatgaaagtattggcattcaaaaagacagcagacaaaatgaaaga

SEQ ID NO: 8727 - DNA, 352 bp, Homo sapiens
ggagaggtaaaaatgttgtacatcagctctcagtaaccctagaagacttatataatggtgcaacaagaaaactggctctgcaaaagaatgtgatttgtgacaaatgtgaaggtagaggaggtaagaaaggagcagtagagtgctgtcccaattgccgaggtactggaatgcaaataagaattcatcagataggacctggaatggttcagcaaattcagtctgtgtgcatggagtgccagggccatggggagcggatcagtcctaaagatagatgtaaaagctgcaacggaaggaagatagttcgagagaagaaaattttagaagttcatattgacaaaggcatgaaagatgg

SEQ ID NO: 8728 - DNA, 392 bp, Homo sapiens
ccttggatgcagatcaatgctccaataaagttcattatcagctcctcctgccttgtgacaggatgatttgattttacaaaagtccctttgaaaacaagagtaaacgcagacagcttctagagaaaagtctggtgaagcagcagttgataatagattttcttttagtgatgaaattaatcttgttttggtaatctacagcctgttagggataggtggagggatgaagtccttaaaactaaattgttcctctacgaatcttcgacctgagcctgcggagagagtagccccaaatccatctctctgctgaaaggtcgcctgttttggtaggtgtgaggacattccgaaacacggccatccacattctgatacatcgcttcttctgcatctgtcag

SEQ ID NO: 8729 - DNA, 608 bp, Homo sapiens
  misc_feature (1)...(608): n = g, a, c or t
gctgggagagctagactaagttggtcatgatgcagaagctactcaaatgcagtcggcttgtcctggctcttgccctcatcctggttctggaatcctcagttcaaggttatcctacgcagagagccaggtaccaatgggtgcgctgcaatccagacagtaattctgcaaactgccttgaagaaaaaggaccaatgttcgaactacttccaggtgaatccaacaagatcccccgtctgaggactgacctttttccaaagacgagaatccaggacttgaatcgtatcttcccactttctgaggactactctggatcaggcttcggctccggctccggctctggatcaggatctgggagtggcttcctaacggaaatggaacaggattaccaactagtagacgaaagtgatgctttccatgacaaccttaggtctcttgacaggaatctgccctcagacagccaggacttgggtcaacatggattagaagaggattttatgttataaaagaggattttcccaccttgacaccaggcaatgtagttagcatattttatgtaccatggntatatgattaatcttgggacaaagaattttatagaaatttttaaa

SEQ ID NO: 8730 - DNA, 600 bp, Homo sapiens
gatcacctgaggtcaggagttcaagaccagcctgaccgacatggtagaaccccgtctctattaaaaatacaaaaaattagctgggtgtggtggtgcatgcctgtaatcccagctacctgggaggctgaggtataagaattgcttgaacctgggaggtagaggttgcagtgagctgataccgtaccattgcactccagcctgatcaaccagagcgaaaatccatcaaaaaagaaaaaaaaaggaaggaaggaagggagggagggaaagaaggaaagaaggaaggaaggaaggaagaaaaaagtggggcaaggcagcaagaagatgctgacttgttttcagcaatcatcagttatgattacttctcttcttttaccaaaaacttggacctccagcttcctgtaaacctttatcccagctcttactggtagacatgcagtgaagccagagggaataacaagtacccagcacttgaaaaacactttcagtcaagcatggtggcacatctgtagtccccgctacttgggaggctgaggtaggacgatcacttgagcccagagttcgaggctgcgatgagctatgattgcacctgtgaatagccat

SEQ ID NO: 8731 - DNA, 604 bp, Homo sapiens
ctgcacatggattggttaacataatatatactgctatataatcttttaagggctaatatttgtagataatttaaaagcatgtcaatttcctctaagatttgattatttaacctgcacaaaggccaatcttcagttatcaatgacaagaaaactctagggctgccaaaataacttcattttagaccccagagttagtgttaggctggtaatgtttctaatttgggaataatgagactagaaagctaggagggccccctccaaatttctcccttgtattaggctgaagtagaacataacgtggcttaaagcataaacttaaagcatatgctttgagttttaaaaatgttaacctgtaattaattattagagtattatccatagtctactatgatagtcagttaatattctctaaatcagattatattcatttgaaaatgcatctgcatatttgcaaatgtgttattacacaagatcttacctatgtcaatttaaagaggttaaagatgcaggaagcccccactaaaatgtaaacacatttgtacggttttcagaatgtttggactcattctttcccattgacagagcagtaggttttaattagagt

SEQ ID NO: 8732 - DNA, 604 bp, Homo sapiens
cctagatcattcatattgtacattgacatttttacataaatggaattaatactacttaccatttgagtaaagaacacaaggaattgaagagtctgtgaaaatatgtcctgtttgtgaaaggtgaaactgtccaatccatgtccaatcaatgtcagtcgtccagtattggtggtgattattaaacttattggaggtacaactttacctccaataagcttacctttacaagcttctgctttccctgcttcatctctgttatgggctatcagtccagcttggtgtgaaaatgagactatatctataccacagcccccaatcctttcaaaggctttgcatgtatttcagctacaagtgacaaggatattaaggatttaaaaggataagagagtgggaaagatgtataaggaagtgcctttgtcaaaaggcagcaaaaagtataatgatataaacataatatgaaataagcaaattttagaatactttgaaacagatttatagaggaatacatagtaaatagttatagacacacatttggggcatttttaataaggttagcaagaagaaatttgcatgagtaatgagcaatgtgaaatgggcattatac

SEQ ID NO: 8733 - DNA, 563 bp, Homo sapiens
ctgcgcaaggagtcccagaaagaccgcaagaacccgctgccccccagcgttggcgtggttgacaagaaagaggagacgcagccgcccgtggcgcttaagaaagaaggaataagacgagttggaagaagacctgatcaacaacttcagggtgaagggaaaataattgatagaagaccagaaaggcgaccacctcgtgaacgaagattcgaaaagccacttgaagaaaagggtgaaggaggcgaattttcagttgatagaccgattattgaccgacctattcgaggtcgtggtggtcttggaagaggtcgagggggccgtggacgtggaatgggccgaggagatggatttgattctcgtggcaaacgtgaatttgataggcatagtggaagtgatagatcttctttttcacattacagtggcctgaagcacgaggacaaacgtggaggtagcggatctcacaactggggaactgtcaaagacgaattaactgacttggatcaatcaaatgtgactgaggaaacacctgaaggtgaagaacatcatccagtggcagacactgaaaa

SEQ ID NO: 8734 - DNA, 600 bp, Homo sapiens
ctggctccagggatggtacaacagatgcagtctgtgtgctctgattgtaatggagaaggagaggtaattaatgaaaaagaccgctgtaaaaaatgtgaagggaagaaggtgattaaagaagtcaagattcttgaagtccacgtagacaaaggcatgaaacatggacagagaattacattcactggggaagcagaccaggccccaggagtggaacccggagacattgttcttttgctacaggagaaagaacatgaggtatttcagagagatgggaatgatttgcacatgacatataaaataggacttgttgaagctctatgtggatttcagttcacatttaagcaccttgatggacgtcagattgtggtgaaatacccccctggcaaagtaattgaaccagggtgtgttcgtgtagttcgaggtgaagggatgccgcagtatcgtaatccctttgaaaaaggtgatctttacataaagtttgatgtgcagtttcctgaaaacaactggatcaacccagacaagctttctgaactagaagatcttctgccatctagaccggaagttcctaacataattggagaaacagaggaggtagagctt

SEQ ID NO: 8735 - DNA, 594 bp, Homo sapiens
cctacctgcaagaggaattgaagattaaacgttctctcttcaactaccatgacacgaggatccatgcctgcctctactttattgcccctactggacattcactaaagtccctggatctggtcaccatgaaaaagctggacagtaaggtgaacatcattccaataattgcaaaagctgacaccattgccaagaatgaactgcacaaattcaagagtaagatcatgagtgaactggtcagcaatggggtccagatatatcagtttcccactgatgaagaaacggtggcagagattaacgcaacaatgagtgtccatctcccatttgcagtggttgacagcaccgaagaggtgaagattggcaacaagatggcaaaggccaggcagtacccctggggtgtggtgcaggttgagaatgaaaatcattgcgattttgtgaaacttcgagagatgctgatccgcgtgaacatggaggacttgcgagagcagactcacacccgccactatgaattgtaccgacgctgtaagcttgaagagatggggttcaaggacactgaccctgacagcaaacccttcagtcttcaggagacatatgaag

SEQ ID NO: 8736 - DNA, 600 bp, Homo sapiens
cttgtaactatcaaaatgaatagttcatttttgatagatttgttgtgcagccattatgaattaaatggtttattaggagtttgactaaatttttatttttagtgtgtatagcatgaatactaccaaaggagacgacaaacttgcagcttaaaatgggcaccagttcccacactggcttaatttatataactgcttggctgtattgcgggtaataatattagaagcaagaagcacttcatttttaaaagagatgttactataatattgcttaaatgctttagcacttggacttcttgagatgcagatgtgtgatttggagtgctggcttatttaaaggtcaagccaaggagtttgtggttcagccacaactactgttttctaagactattgatgtgaaggacttagtgaagtaatttttatattctgggcttcccagcaagatgtcctttttatgactgccatgcttcttttggactcagtaaatatttgtaatgttagaaaagtctcattatttttataaaatgcatgacattttaagtatgtgttgcataaaatggattatagcagttctcatggtttaggatttttaagaaatagtcc

SEQ ID NO: 8737 - DNA, 329 bp, Homo sapiens
  misc_feature (1)...(329): n = g, a, c or t
gcccannacctctgcaaggtctgctcgttactatgcatgangtnngctatgatggnggcacanctgnngctgataccaatgaagtgacacatgtggcgtaagaagggaagaatctgggcttccggggaatcttctatccggatgtgcagaagcttgtcagcatcgcctgcaaaaaagggccctgtatccatggagacattgacatgggctttgattttcaagtccttctgaatcttggggtcacaggcttgactgaaattgccaacgaagaccttccctggcacgatttcaatggggtatggcntgaaatgcatccagttcctgaggca

SEQ ID NO: 8738 - DNA, 607 bp, Homo sapiens
ctgataatttacaatgtcataaagtttccagtttcacaatacaaaaaggataaaatgaaattgggtatcattttgttgcaatttatagaactttacccatacctgtaagaccctcaatgtatatgaaatcattttcactgggaaagtgacagttacagtaaaagcagaaccacacaaatctttatttaaaagccgaaatatcagccttctctctctcttttgctatttgaaaggtagtcttcaatttggcaggcaactgcttctctctccaaatagtaacaggttacaaacatgctactttaaatatgaataggacctaaggctttagtattttaaatcttgcccaatacagaaatgcctttcaagagactttagtgatgcttaatttatgaacaacaaggaattattttccttttgattattcactttttcaaaactcatagatcagaataaacaaaaaatcccccaacccatggtggggacacaaaagtaacataagtgactaaggtgtgccattcatagagaggttgaagactccatgccccaggaccacttagctgcaatagggtgaaatagtctactttttgatttcatgaatttttttcta

SEQ ID NO: 8739 - DNA, 279 bp, Homo sapiens
  misc_feature (1)...(279): n = g, a, c or t
tttttttttttttttttttttttactcataaaaaacattttactttaattatagggtncaaataanagtcttaacacanaaatcctacctcctatttaagatataaatacttgatgatntaatcaatcaanagggattaattaatgtcagttgaaaatctaatgacttaaatccataaatgccatttgcttttgtctggaanatttaaactgatttaagggngacacacagcanagttctagnggacattcgtgttaaccgtttggngctcaaaatgga

SEQ ID NO: 8740 - DNA, 605 bp, Homo sapiens
ctgtggctgtctgtcagagaagcacatttttctgcagataattagaatggcttcccccatctctcacggactgtcccaagtctagaaaagaattgagttcctcttctattagtcaaataaaagggaagagaatgtttgtcttcctttcctttctgtagtgttaagaaaataaacgaacttaatgattctaaattatcagtgagcttaacactgtactatagaccaaagattaccttttcaaaaagtcctttgaggtgaaatattttgtatacgtaatacatagatgcacatataaacacacacatatagaatctcaatattttaacacttctttgggtagttgtactaactcactaaccctgaggaaaaagttaagaaattgaaagtgttttcttcaaaagttgagatttaacaataaaaggtgttactttgataactaaaaggaactttattatcctcttcctaaaataaaccaatgcctattctgaaaatggcacttgcaattacaatttgccattatcaaagctaccactgaggtagaggcattatctaaaacaaataccacttatcatttattggcagttacctcgagagagacccataca

SEQ ID NO: 8741 - DNA, 596 bp, Homo sapiens
  misc_feature (1)...(596): n = g, a, c or t
ctgggagagctagactaagttggtcatgatgcagaagctactcaaatgcagtcggcttgtcctggctcttgccctcatcctggttctggaatcctcagttcaaggttatcctacgcagagagccaggtaccaatgggtgcgctgcaatccagacagtaattctgcaaactgccttgaagaaaaaggaccaatgttcgaactacttccaggtgaatccaacaagatcccccgtctgaggactgacctttttccaaagacgagaatccaggacttgaatcgtatcttcccactttctgaggactactctggatcaggcttcggctccggctccggctctggatcaggatctgggagtggcttcctaacggaaatggaacaggattaccaactagtagacgaaagtgatgctttccatgacaaccttaggtctcttgacaggaatctgccctcagacagccaggacttgggtcaacatggattagaagaggattttatgttataaaagaggattttcccaccttgacaccaggcaatgtagttagcatattttatgtaccatggntatatgattaatcttgggacaaagaattttatag

SEQ ID NO: 8742 - DNA, 596 bp, Homo sapiens
ctgaaagtttttgaaacaaatatttgaaaaccaggtatccacacatagcacttttattcctgactagttttgcacacttgaaaattgtttacttattttacaactgttttactgatgctatctttattgtttttgccgtattctgacatgtcaaatctatgccttgaattatatcatctcttttcctgtgggtttcatttgttaaattcattggattttaataatataaaagtatagctaattgttcagttttaactatttttaattatcttcttaacaaataagaagttgctttaaacattaaccaattttctatatttagctatacagagtaattgaacttaacatgtttttgtcaacaccaattacattttcagcttttaaaaatggtagcttttgtgaaatagaatcagtgaccagtatagcacttagatcccttctaactcatataatttttctcagccaatccattcacaagcttggcattgacatgtgctgctagtttataaactggcattgacgaaaatcatttgaatctcttctgctgagataatttgccaatgcaaaatacagttgtcattaatcctgcacattag

SEQ ID NO: 8743 - DNA, 601 bp, Homo sapiens
cctgtttgattgtagctatgttggtgtatctcgtgtacaagatggaaaagtgcttttgttgttctacctgatccagttgggggagcaggaatagggggtgcctgcctaacggcctctagcccatgtgcttatactgggatctgtcccgagggatctgcacctggttggcagtcattttgtggtggacgtggtaaatcgcgagtgttaccatgatgacgaggcccaagatgagccccaaaatcaggggcaaggtttcttccagttgctcccgctcatccactgggcatttatgctcttcactgaagacaaaatctgagataatgtcaaaaggttggatgtggaccgcagacaggatcatggtgaccgtcttctgcggatcactagaggccagtgaaatggtttgttgagcttgacactcataggacttcccagcgggggtgaccaaggcagagaggtggtgcgagttggctgtgtgcttcccagcactgactgcgtctttgaagtgggttttctccgaggagtcgtagacaaactgcactttgctcagcctccaagtcgcctcaggtcccttggacatgttgtggctttcctttacaaagag

SEQ ID NO: 8744 - DNA, 488 bp, Homo sapiens
cctactatgggtgttaaattttttactctctctacaaggttttttcctagtgtccaaagagctgttcctctttggactaacagttaaatttacaaggggatttagagggttctgtgggcaaatttaaagttgaactaagattctatcttggacaaccagctatcaccaggctcggtaggtttgtcgcctctacctataaatcttcccactattttgctacatagacgggtgtgctcttttagctgttcttaggtagctcgtctggtttcgggggtcttagctttggctctccttgcaaagttatttctagttaattcattatgcagaaggtataggggttagtccttgctatattatgcttggttataatttttcatctttcccttgcggtactatatctattgcgccaggtttcaatttctatcgcctatactttatttgggtaaatggtttggctaaggttgtctggtagtaaggtggagtgggtt

SEQ ID NO: 8745 - DNA, 383 bp, Homo sapiens
ctgtagagtgggcttatcatctttcaacacgcaggacaggtacagattcttttccttgaggcccaaggccacaggtattttgtcattactttcttctccttgtacaaaggacatggagaacaccacttgttgctccatatcctgtccctggaggtggagagctttcagttcatatggaccagacatcaccaagcttttttgctgtgagtcccggagcgtgcagttcagtgatcgtacaggtgcatcgtgcacataagcctcgttatcccatgtgtcgaagaagataggttcttcttcaaagatgaagggaaagaaggtgctcaggtcattctcctggaaggtctgtgggcagggaaccagcatcttcctcagcttgtccatgg

SEQ ID NO: 8746 - DNA, 368 bp, Homo sapiens; identical to SEQ ID NO: 8376

SEQ ID NO: 8747 - DNA, 605 bp, Homo sapiens
  misc_feature (1)...(605): n = g, a, c or t
cctctacaacnctgaatgnggaatattttaaatgtaatctaaggaataaccactagggtgtggtaagtgaatatcagagtaaggctcatggagaacatggagtacttcctaaatcataattttattataaaatgacggaattactagttgtaattactgaatagcctatattgctatttattgtgtgtttcatcactttaggggtctagtatggtggatgttagtaattatctaagtgaatgaagaagcactccagtggaaagttcttatatgccattatgttcttttcctggcccagtgcctaagtgaagtaggtgtttataacttaacctaaacgtactaagatttcagatcaataaagttattaaaataaaattggtaccagccaattttcaaataaggttgctttttattttttaagtaaaattatgtttataattaaaccataagacaaatagtattttttttaaaaaagaaaagaatgtagttttattaataatttactgcattgntctcattctcaatttactgnggaccattagaaacttgtgtatagtctggcagtggaaaccatcagtgtttggaaatgaatggttgaaaaggct

SEQ ID NO: 8748 - DNA, 308 bp, Homo sapiens
ccagtttaggccggaaaagaatcatccattgcagatcagagcctttgctaaattgctgaataagaagatggttgagtcacctccttcgcttaaacttgtcctcattggaggttgtcgtaacaaagatgatgaacttagggtaaaccaactgagaaggctgtctgaggatttaggagttcaagaatatgtggaatttaaaataaacattccatttgatgaattaaagaattatttgtctgaagcaacaattggtctgcataccatgtggaacgagcattttgggattggagttgtggagtgtatggcag

SEQ ID NO: 8749 - DNA, 306 bp, Homo sapiens
aggttcggccttaacatagatcgatggttgacaatccagagtggtgaacagccctacaagatggctggtcgatgccatgcttttgaaaaagaatggatagaatgtgcacatggaatcggttatactcgggcagagaaagagtgcaagatagaatatgatgatttcgtagagtgtttgcttcggcagaaaacgatgagacgtgcaggtaccatcaggaagcagcgggataagctgataaaggaaggaaagtacacccctccacctcaccacattggcaagggggagcctcggccctgaacagagcag

SEQ ID NO: 8750 - DNA, 125 bp, Homo sapiens
ctggggccccatcatcatgggctgagagctccatgtctgtggggagctccttggcaacaggctgcagtaggacaggatgtgcttcatcgtctatttgggcttcctcagcgtcacccatggtacag

SEQ ID NO: 8751 - DNA, 193 bp, Homo sapiens
gttacacgcgggttcaacatgcgtatcgaaaagtgttatttctgttcggggcccatctatcctggacacggcatgatgttcgtccgcaacgattgcaaggtgttcagattttgcaaatctaaatgtcataaaaactttaaaaagaagcgcaatcctcgcaaagttaggtggaccaaagcattccggaaagcag

SEQ ID NO: 8752 - DNA, 604 bp, Homo sapiens
  misc_feature (1)...(604): n = g, a, c or t
ggcaggtgtggtgccttggctaagtccacagacttctgagaggcccacgctttcttcttctccagaaataaaccctgaaactcaagcagctttaatcagagggcaggattccacgatagcagcatcagaacagcaagtggcagcgagaattcttgattccaatgatcaggcaacagtaaaccctgtggaatttaatactgaggttgcaacaccaccattttcccttctggagacttctaatgaaacagatttcctgattggcattaatgaagagtcagtggaaggcacggcaatctatttaccaggacctgatcgctgcaaaatgaacccgtgccttaacggaggcacctgttatcctactgaaacttcctacgtatgcacctgtgtgccaggatacagcggagaccagtgtgaacttgattttgatgaatgtcactctaatccctgtcgtaatggagccacttgtgttgatggntttaacacattcaggtgcctctgccttccaagttatgttggtgcactttgtgagcaagataccgagacatgtgactatggntggcacaaattccaagggcagtgctacaaatactttgcccatcgacgc

SEQ ID NO: 8753 - DNA, 126 bp, Homo sapiens
ccacacccaggagggttgattggcaggctggaagacaaaagtctcccaataaaggcacttttacctcaaagagggggtgggagttggtctgctgggaatgttgttgttggggtggggaggagttat

SEQ ID NO: 8754 - DNA, 494 bp, Homo sapiens; identical to SEQ ID NO: 8713

SEQ ID NO: 8755 - DNA, 597 bp, Homo sapiens
ccatcggtgctgaaattgagcattttaaatagtacagtaggctggtatacattaggaaatggactgcactggaggcaaatagaaaactaaagaaattagataggctggaaatgcttactttctgctctcattttctttcattttgtctgctgtctttttgaatgccaatactttcatttaaaatgttttgggagcacggcaacccaaaatgactgaacggtggtccaaaaatccaaaccaactgataattacttctcgaggtgataggaaaggcacaggaagttaggactttggctgaaatgatgaaaacacatgttcgccattttagggatcagcgcctcgactcctgccacctccggctccaacgatgatcatgtttggatgtatttattgaattgtcctttgctgatgaggaatttttaaagtatttcatagaataagtcctttggtatgcagatgctacatggaaggaaagaaagaaaaaaagaaaacacacaatattacttgctccataccctaaactgccgataccacagccgtaaaatgaaggtgtctagtagttgttatagcacggtagtccattctttctaaaggacc

SEQ ID NO: 8756 - DNA, 589 bp, Homo sapiens
cgcgtgcataaaaactggttctacaaatttttacttgaagtaccaggccgtttgctttttcaggttgttttgttttatagtattaagtgaaattttaaatgcacagttctatttgctatctgaactaattcatttattaagtatatttgtaaaagctaaggctcgagttaaaacaatgaagtgttttacaatgatttgtaaaggactatttataactaatatggttttgttttcaatgaattaagaaagattaaatatatctttgtaaattattttatgtcatagtttaattggtctaccaagtaagacatctcaaatacagtagtataatgtatgaattttgtaagtataagaaattttattagacattctcttactttttgtaaatgctgtaaatatttcataaattaacaaagtgtcactccataaaaagaaaactaatactaatagcctaaaagattttgtgaaatttcatgaaaactttttaatggcaataatgactaaagacctgctgtaataaatgtattaactgaaacctaacactgtttcagggctgtgagtgtgcatgtgttggaaatgtgcatggtgg

SEQ ID NO: 8757 - DNA, 603 bp, Homo sapiens
ccacagaacagtccctttttgagtaaagcagcaaggttgcttaatgacatgctatgtggttaacaagattcaactgccacatcaaggactttaaataatttcaagattttaaatgtatttatgaaatgaactcattacagcagctaatcaatgcaaactttgtcctttttctttgtctttctaagagaaactgaatttaatttaaatttaaattacagtgtctaaaacttggtaaaatattttaaatttgaataagaggaaaaaaaaaacatgaatttatttatgatggagcttcatacccaggacagtagcttcttaaatgttagtaaaataattatgttaagcattaaaacaattttgaatatgtaattaagcatttatgttaaaaaacatgtttcttacgtgtgtgtgtatatatttataactgacacatgtgattctttgtacagtatttagaatccttcccttcagatagcagtcctcttgtattcagtcttgtggctaaaatagatcaaaaacatattttaaaactgttaaagtaactgtatgactcatgcttgaagttctgaaatttgggagcgttatgaggtttccatgccatta

SEQ ID NO: 8758 - DNA, 591 bp, Homo sapiens
  misc_feature (1)...(591): n = g, a, c or t
cgcgtggatggatacagagcggcttctacacggcgccatcaacattctctttatgaacgtgagtggattctccaggcaaactatgcactatttcatggtcggaaagaatcaaaggaagtttaaatgagggtggagttaaactgtgctaaattacagtagtgcttattagtaactagatttcaaaaggttacagaaaatttacattctctacacaaaaactgcatctcctgcacagacaacatcgacatcgacacaggaaggaaactgattgtccattctttgcccaggaagtctcggtactttatagattcgtctttacctcttttttgttgttgttcttccgaaaaagcagtttaaatttttttctttttctttttatgctagggacgtggagatgttaaaacgacaacaaaaaatatatatataaaaacaggaatgaaatctgtgagagaatatttttggttctaaagacgggtgcatccgtttgtcttcgcccgaatcccttgctggagaccacacgagcagtgacattgcacggagagggcagctttgggttccgccgccgtcactgaaaccaccggaaggcggntc

SEQ ID NO: 8759 - DNA, 559 bp, Homo sapiens
  misc_feature (1)...(559): n = g, a, c or t
gtgcgctgcaatccagacagtaattctgcaaactgccttgaagaaaaaggaccaatgttcgaactacttccaggtgaatccaacaagatcccccgtctgaggactgacctttttccaaagacgagaatccaggacttgaatcgtatcttcccactttctgaggactactctggatcaggcttcggctccggctccggctctggatcaggatctgggagtggcttcctaacggaaatggaacaggattaccaactagtagacgaaagtgatgctttccatgacaaccttaggtctcttgacaggaatctgccctcagacagccaggacttgggtcaacatggattanaagaggattttatgttataaaagaggattttcccaccttgacaccaggcaatgtagttagcatattttatgtaccatggttatatgattaatcttgggacaaagaattttatagaaatttttaaacatctgaaaaagaagcttaagttttatcatccttttttttctcatgaattcttaaaggattatgctttaatgctgntatctatcttat

SEQ ID NO: 8760 - DNA, 343 bp, Homo sapiens; identical to SEQ ID NO: 4922

SEQ ID NO: 8761 - DNA, 549 bp, Homo sapiens
  misc_feature (1)...(549): n = g, a, c or t
ccttaagcatttgctaaacaggttcaagtaagtttagtaaagtttcattactgccattgattcaattatcaaactgcttttgtacatataaagaattcttcagatgcatggtttctattaacaagatccaatgccttccttttatttccccttcagttcaacatctaatatataaagattgctctgactactacgcaataggcaaaagaagcagtgagacctacagagttacacctgatcccaaaaatagtagctttgaagtttactgtgacatggagaccatggggggaggctggacagtgctgcaggcacgtctcgatgggagcaccaacttcaccagaacatggcaagactacaaagcaggctttggaaacctcagaagggaattttggctggggaacgataaaattcatcttctgaccaagagtaaggaaatgattctgagaatagatcttgaagactttaatggtgtcgaactatatgccttgtatgatcagttttatgtggctaatgagtttctcaaatatcgnttacacgttggtaactata

SEQ ID NO: 8762 - DNA, 440 bp, Homo sapiens
cctgagctgtcatgcccaagggagacccagagacccaaattttcagtaaaaacttggaagagactctgattttgtttagaatagtggggggtggggacgaaatggggatgaggttgccagggtggagtgagacagcatcttggccctgggagtgtgggaaatttatgagtccttagatgaacagttaacaaaagttatgatgctaatggaaggcatcatagcttatttataagatgatacttaaacacttatgtgacatttaccatgtgctttggaggaggcacttttgttatcagccccatttccacagataagaaaactgaagcccagagaaataggtaagtggccccagcttacacagcttgcaagttgcggagccagggctggagctccaaaagcgctgcttggggtccacgcacttacctgttacttggcccagc

SEQ ID NO: 8763 - DNA, 159 bp, Homo sapiens; identical to SEQ ID NO: 7615

SEQ ID NO: 8764 - DNA, 332 bp, Homo sapiens
cctcagagtctgagtatagcctactccaattaagctagagttgttgacttttgcagaaatggaagcagtgggatccaactgatatttagctgcaatgccaaaacgagtgcagttggtacctgatgtccaagcaaggtttactgaagtgtcaagatcttcacaaactttctgataaattgatcctccaaattctgtcccatcattgacattagtgtgtagctggaagtccccagtcctgtagcccactgcaaagttattccttgtcagctttgatttggcactgtcaaaggtcatctggtagccagcaagccagccctcataaccaaagacag

SEQ ID NO: 8765 - DNA, 174 bp, Homo sapiens
cctggctcaacaaaagggctggggattggccctgaaaggagagagctgactgtcctggctgatggacaggagatcctcttagcactaccctaaggcaggcagttgggcattggtgtagacaacaggaaagtccaggctatagccgtactcaaaaacctttctgttccctttctg

SEQ ID NO: 8766 - DNA, 600 bp, Homo sapiens
ctggcaatgacaagactgggagtatcaaactaggattgttagttcaattaaaatttcagataaacaataatgtacttatactaaaaaattatttgttgtttatctgaaatgaaaatttaactgggtacccaattgtttgtttgtttaatctaaaaaccctgattgaaatttatctaataaaacatcatttaatatctaaaataaaataaatttactataacatctttataactattcaatcaatgattcatcttctatttttccaaattcttgcacaaatatttgatgcttaaataaatacataaataataaataggttaataagttacacttgaaaataatttatgttatgatgaaaaaacttaaagtgcttccacatgtcctcacaacatcactgtgaggtaagatggtggctaatactttttccacttagaaataaaggagaaaccaaggcacagtggaacaaggacttgtggatcctggctagcagactagggttgccagatttaacagaaaaaaatccaggatttccagctaaatttgactttatggcaaaatttattgtcccatcatttttatgtgatgcttcaaatatcacat

SEQ ID NO: 8767 - DNA, 600 bp, Homo sapiens
  misc_feature (1)...(600): n = g, a, c or t
ctgaggtggcagatagtgagcgctggtggcggagttaaagtcaaagcaggagagtaattatgaatagcgcagcgggattctcacacctagaccgtcgcgagcgggttctcaagttaggggagagtttcgagaagcagccgcgctgcgccttccacactgtgcgctatgacttcaaacctgcttctattgacacttcttctgaaggataccttgaggttggcgaaggtgaacaggtgaccataactctgccaaatatagaaggttcaactccaccagtaactgttttcaaaggttcaaaaaaaccttacttaaaagaatgcattttgattattaaccatgatactggagaatgtcggctagaaaaactcagcagcaacatcactgtaaaaaaaacaagagttgaaggaagcagtaaaattcagtatcgtaaagaacaacagcaacaacaaatgtggaattcagccaggactcccaatcttgtaaaacattctccatctgaagataagatgtccccagcatctccaatagatgatatcgaaagagaactgaaggcagaagctagtctaatggaccagatgagtagttgngatagttcatcag

SEQ ID NO: 8768 - DNA, 602 bp, Homo sapiens
  misc_feature (1)...(602): n = g, a, c or t
ccattgcaaagaaagcttctgtgaacattgctcctatgtcttttggtggacacatgcttccatttctccagggcagatacctaggagtggggttgctggtgtttggtgtgagtagtgtctgtttaggtttataaataacctgcccaactcttttccaactgtaccattttgcatttccaccagcagtgtgaacattccagtgtccccacccctctacccttgccagcacttggtgatgtcagtcttttctttttattgattctagtgagtatggagtggtattctgttgtagttttgacttgcatttcccaagactaatgacactgagcgctttttcatgtgcttacttgtcattcgtagtatcttctttggatagacaccttcatacattctaatttcactggcaaacgattatcccaaaatggattaatttatgactggngtctattatatcacataatgctgtgttaagtcttagggatgaaaganaaggnctgtgtgtacttctttttttctccccaaaaccacttattgagatggctagtgagataaaggtcatgttaagcagggcacagcagagttggaggagatggacaggaatg

SEQ ID NO: 8769 - DNA, 607 bp, Homo sapiens
  misc_feature (1)...(607): n = g, a, c or t
tcctactccgatgacaagttttatgcaactaatgacactgaggtcgcccagagcaattttgaggcccttcaagatttcttccgcctctttccggagtacaagaacaacaaacttttcctgaccggggagagctatgctggcatctacatccccaccctggccgtgctggtcatgcaggatcccagcatgaaccttcaggggctggctgtgggcaatggactctcctcctatgagcagaatgacaactccctggtctactttgcctactaccatggccttctggggaacaggctttggtcttctctccagacccactgctgctctcaaaacaagtgtaacttctatgacaacaaagacctggaatgcgtgaccaatcttcaggaagtggcccgcatcgtgggcaactctggcctcaacatctacaatctctatgccccgtgtgctggaggggtgcccagccattttaggtatgagaaggacactgttgtggtccaggatttgggcaacatcttcactcgcctgccactcaagcggatgtggcatcaggcactgntgcgctcaggggataaagtgcgcatggaccccccctgcaccaacacaacagacc

SEQ ID NO: 8770 - DNA, 537 bp, Homo sapiens
ctgttagggctgaatcttctggagaaaaaggtgccatctcaggagaatagcttttactctggtaggaatgcttccgagacaccacaaggcagcctgaacactcagttgcagggtcgggcttgcggtgggtgacccagagccaccaaagtcacatccacaactaatgagggaaatctgtaaagccagttagatagaagaattttatttttctgtgggttttgtgttgtcttttttatgttaaaaagaaatccagtttgtgtttttctatagaaaaagtaaaagatcaggttatactttaggttaggggttctatttattcctgttagtaaataaaattaacaaatttctttgtttaacaaaagattaatctttaaaccactaaaatacatagactgattgattattcaacacattggaattgatgtcggtcatagtttcctgaagcatttagttacaacctgaaggaataaaatgatttgtggaaatgcttaaaatagacctaactgaatacagtctcatcttgccgcgcctggctta

SEQ ID NO: 8771 - DNA, 229 bp, Homo sapiens
  misc_feature (1)...(229): n = g, a, c or t
catatatttcgggtttatcnaagcancttcnccagggacgtgaaggaattcgccaaaatgctacgcttatcctatccctnggagctccaggtgtccgctggctgtgaggtgcaccctgggaacgcctcaaataacttnttccatgtagcatttcaaggaaaagatatcctgagtttccaaggaacttcttgggagccaacccaagaggccccactttgggtnaacttgg

SEQ ID NO: 8772 - DNA, 516 bp, Homo sapiens
ctgctaataatgcttatactatatttgtagcttaactagatgttaaactatggaactgttggtgccaatctgcttataaaggcaatgctctggagacaaagtcttctcacaaacagtgggcaagcaggtttcattattatgtgttcaacaacaatcctcagttcattaaataaggtccgacaatatgggtttcttcgagacgaatatcgaagggtaagaaatctatagtatataaaaggttggagcaaacttccttgaccactaaaaagcataaaaactgtcgcaggcatcaggaatatttcattgcaagcaatgaatttcagaatattttgttgattagcacttaatttgtccaagacagatctcagcagaggtaaactatttgagccccttgcgtcaaggacctttttcgtatatgtggcagcatgaagcaaagagaataacaagactgggaagatactcattgtaactggataggaatttacaaagatgagtgaatacaacaggtagtggcag

SEQ ID NO: 8773 - DNA, 450 bp, Homo sapiens
ctgtgttgtcgggcatggacgcctggtcagtgttccgctccttcttgaagacgatgttgccgagctgaagaacccctgagatgacccgcagcaggcccatttgctcctcttctgggatgcccataatcctcatggcctccatggtctcctggaacatgtccttgtcctgctgcccggggatggtgacgtgtccattggacaggaagcggtatttgttgtacggctccaacaggagatcggtcttcaggtgctctccagccccagacaggagataatagaagatgtggaaggtccgttcttccttggcttggcggatagcacgagatttctccaaaagataagtctcaatgttggctccaacaatgtagccattgacatcaaagttgatgcgaatgaatttgccgaagcgggaggagttgtcattcttcacggtcttggcgttcccgaagg

SEQ ID NO: 8774 - DNA, 601 bp, Homo sapiens
catcggtgctgaaattgagcattttaaatagtacagtaggctggtatacattagggaatggactgcactggaggcaaatagaaaactaaagaaattagataggctggaaatgcttactttctgctctcattttctttcattttgtctgctgtctttttgaatgccaatactttcatttaaaatgttttgggagcacggcaacccaaaatgactgaacggtggtccaaaaatccaaaccaactgataattacttctcgaggtgataggaaaggcacaggaagttaggactttggctgaaatgatgaaaacacatgttcgccattttagggatcagcgcctcgactcctgccacctccggctccaacgatgatcatgtttggatgtatttattgaattgtcctttgctgatgaggaatttttaaagtatttcatagaataagtcctttggtatgcagatgctacatggaaggaaagaaagaaaaaaagaaaacacacaatattacttgctccataccctaaactgccgataccacagccgtaaaatgaagggtctagtagttgttatagcacggtagtccattctttctaaaggaccacttac

SEQ ID NO: 8775 - DNA, 462 bp, Homo sapiens
gtcggagtggtctctggtagaacccaaggacttctgggtactgagaagcagcagcagaatgaggccaaatgcagagatgaggctaaggcaagaatatgccccaactaaagcatagattccccaaagtgaggctcatggtgggaggccactcaccttcctagctgctgctcgaaaaggttttgactgtgttggggtgggggttgggtaagggaatggtcaagactgagaaaggaatgaaatccattcaggaaatatcgacagggctacacgtgatgtccccaaactgctgctattgaagaacttcccaaaacttctttacaaagccctaaaggaaagtttgcatctatgaaaagccaataggctgagacatccaattgctgcatggaaattgatgtacattcaggggacggcaaaaatagctgtaaaatagtgaaaaagagcagtggttgtgctcttttctgg

SEQ ID NO: 8776 - DNA, 549 bp, Homo sapiens
  misc_feature (1)...(549): n = g, a, c or t
ccactaaagcatagtacgtagatgtcagtgagacagcatgagagccagcagtcatcaaagcgttccacgtttgaagttagcaactgcttaaagttatgccctattaaaattgctttctcaaaagtttgggttagtttcaaatgtgatattttggagggaaggtaaagtaggtatctttcaggtcgtgataatgagctcctatgaaaggatgcaatataatgacccgcttttctagaaagttcataatcagctctggaacaagcacacttgattcctcactgtgcttcagaatgagattaagatcagatgttggaacgtgctatgctgtagcgtgtctggaaacaaagtacacaaacctggctacggtgatgagttagcttctgcttactacctgtgacaacccaagtgggtgacactagtgaaccttctccagtctgcaggctggcatagaaggctcttagattatattgggcagcttgcaatctgccgaagcagtgacttgcatttccacacttggcttgagcactcaacccanaaggcgaagatagc

SEQ ID NO: 8777 - DNA, 408 bp, Homo sapiens
gtaggactttaatcgttgaacaaacgaacctttaatagcggctgcaccatcgggatgtcctgatccaacatcgaggtcgtaaaccctattgttgatatggactctagaataggattgcgctgttatccctagggtaacttgttccgttggtcaagttattggatcaattgagtatagtagttcgctttgactggtgaagtcttagcatgtactgctcggaggttgggttctgctccgaggtcgccccaaccgaaatttttaatgcaggtttggtagtttaggacctgtgggtttgttaggtactgtttgcattaataaattaaagctccatagggtcttctcgtcttgctgtgtcatgcccgcctcttcacgggcaggtcaatttcactggttaaaagtaagagacag

SEQ ID NO: 8778 - DNA, 382 bp, Homo sapiens
  misc_feature (1)...(382): n = g, a, c or t
cctctctcacctctcctactcacttaaagcccgcctgacagaaaccacggccacatttggttctaagaaaccctctgtcattcgctcccacattctgatgagcaaccgcttccctatttatttatttatttgtttgtttgttttattcattggtctaatttattcaaagggggcaagaagtagcagtgtctgtaaaagagcctagtttttaatanctatggaatcaattcaattnggactggtgtgctctctttaaatcaagtcctttaattaagactgaaaatatataagctcagattatttaaatgggaatatttataaatgagcaaatatcatactgttcaatggttctgaaataaacttcactgaagtaaaaaaaaaa

SEQ ID NO: 8779 - DNA, 483 bp, Homo sapiens
  misc_feature (1)...(483): n = g, a, c or t
ttttttttttttttttttttttgtacaaaaatatatttatttggngtaatagttacaaaatattcatttccacaataatattttagcaatgcattggaatgttaaaaaaaattctttgtattaatgattcttgcaaagaccctcaaaacatcccaggggtanaactgnggttcaagaggaaaagcaatttccccaagtctctgtatctaaaaaacactagtaccatgaaanataaacttaaaacatcaataacttaaataanaattaacattacttaaggcataatgtttcacatcaacaaacaaaattcattataataaaataaaacaaggngtctggggaaagctaggggaaaataagttagctgcanattcttgggttgtggagtgagtgttcaagtcttcggagtttgggtttgcttgtccaggtggtccatggaatcctgaacccacttctgcttggggtcagcacanatctccttgg

SEQ ID NO: 8780 - DNA, 369 bp, Homo sapiens
ccactgttgctgagaagagatgggtgatgggttcatatctaaatattaatcaagcctgatttcttgctctcaaattaaactgaggttacttgcctatttggtgcaatatcatcaccctaccacgtgataagcaacaaagtttaaatttatacgctaataatgccaaaagaaaatgttgataatttttatgtattagtggaaatcttttcaaccaattctggtcacttattttgggcaaattatatatatgtgtgtttgtgcattcatatgcaggctaacattcttgcattttcatgttttgcattttaagagactagttggaaaatgctgacctgacctagattttctgaatgataaatgctgccccac

SEQ ID NO: 8781 - DNA, 205 bp, Homo sapiens
  misc_feature (1)...(205): n = g, a, c or t
cttttttttttttttttttttttttttttttggaaaatttgcttttatttacacgtttgagtnaattanatgcatgttttntttttgaggagngnttagcaaaatgcnttaaaattttaaaatngcanttaaatntacaaaaatntagcttacaaaaaactgcnaatgtttaaaaatattctgctgcaaaatttttagngtncaa

SEQ ID NO: 8782 - DNA, 606 bp, Homo sapiens
  misc_feature (1)...(606): n = g, a, c or t
ctgtcccggttatgccggaatcgttgcaggtgagtccatcagaaacaggagctgacaacctgctgggcacccgaagaccaagccccctgccagctcaccgtgcccagcctcctgcatcccctcgaagagcctggccttgctatggatgcgcttaatcaccatggaggccagcaatacccatctcagcatggctttgatattctctacttcctggcctttaaaaatgacctataatttttcagtttgctttactatattttataaagaaaattctatcttatggttgattgagcattgagacttatgaaggcattaggatagatagctcaggaatgtaaaggttcagaaaaggtctgttttctcagattaacaaatatgatggattccatggctgaccttggtgcttaaaccaggaggtttcaatctagtcctagagttgtgtccctctgaaaggcccaatgccatgtaactaactttaaactggatatatactttgagccttacttaattcacagataagttgacttaactcagtatttttatttcaattaatgaaaacagtcctcttttcaaccccaggttgcttacattttgctggnctcccca

SEQ ID NO: 8783 - DNA, 264 bp, Homo sapiens
agaagcagttgcctgccaaattgaagactacctttcaaatagcaaaagagagagagaaggctgatatttcggcttttaaataaagatttgtgtggttctgcttttactgtaactgtcactttcccagtgaaaatgatttcatatacattgagggtcttacaggtatgggtaaagttctataaattgcaacaaaatgatacccaatttcattttatcctttttgtattgtgaaactggaaactttatgacattgtaaattatcag

SEQ ID NO: 8784 - DNA, 706 bp, Homo sapiens
  misc_feature (1)...(706): n = g, a, c or t
ncgacncactanagggcgaattgggccctctagatgcatgctcgagcggccgcccgggcaggtagaaattctatgtggtttcctaatgaagtttctagcagttgtgatgtcttcaaattctcatttaagattttatttagagttaagtcacatgagagatactttcaatgttgtcatctcaatacaaacctgcatacggcatttcactaaatccaggggaaccacagcagtgtgtgtcagaccacaacttaagaccccaccaaagccacacagtgcataatacttcgcggagccaaattcacaactgtactctgtagtaagagaagacacaccatgcattttaatataaaactcatgttactggtcataaacttacctcctggacagttaggtttccacacagcttgttagatgactatatcttataacttaacagtcagtcatgcttcaatatgctctagtccagcatgcaaaacaaacctgcattctgcatttaaccagatctagaggaaccaatgctgtatgtgttgtgccacagctaataattcctccaagtccacaaaggataaagaatctgccagatccatagtcacagctatactgctctgtttgattggaaaaaaaaaaatcaagtaagtatttcttcagagatgactaaggccactggaatgaaagnaaatgtttccctgngagatactattatcac

SEQ ID NO: 8785 - DNA, 536 bp, Homo sapiens
ctgcaacacatgctaaggcacttttattatataaaaaagggggtagggtgggagtttcactcactcctttgtgacagcaactgggacctgaattcagagctttgtaggcatatgcagcttttatatcacttcatgatttgagagtttgtttcctttaaaaaaaaaaaatgccttcttgccgtaagtctcaatgcagcatatacaaaacagttaggaatacaagtaaattcggcaaccagtgtagaccagtgaggacgagctactctcttctaaacaaaggcagtgagaaagactcggaattttatcatttattacaagaaaggggaaaaaagaaaaccttattttgctttcaaaaatacctgtgcaggtggcagatttttaaactatactgagtcaacggtgcaggtaaaccaccctcgggcccagtcctagagtagacacaagatcgcctgggagggccgctggcccctctaacgctctggctgtcagacttgggacaagtcccttaaccattaaatatatttggtcccccaaga

SEQ ID NO: 8786 - DNA, 604 bp, Homo sapiens
  misc_feature (1)...(604): n = g, a, c or t
ccactgtgtagcaccttctaattcaatttcatcggcagttgtaataacagttccagcctcaggtgttttaatggtgggaaacatcttgattgcttctccagaaacttgaccatcggttttgttttggaaatcttggagaatctcagttccttccacagcaataagttctgtgggagaagcttccatttcttctaataactcaggtttaccatcatcttctgaaggttctaattttgtgtcaggagataaagagggaggctcagttatgtgaaggtattcctcacttgatggtttgaaagtcgcttcaatatttacatgaatttccttaaaagaatcctgtggggacattacagatgagccgacgtctattcctggcagagcactgggctgggggatctctgtgtgtccagaggcttcactgcctgagtagatagtgaggggagatgatggtgtctgagaagacaacttcgcaaatgttgaaactgctaatgttgtatcagtgtaatatgggggattggatccttccatcacatcaggcacctctgttacactctgatccataaggngggtagtagcaatacttagatagggagtatggtctact

SEQ ID NO: 8787 - DNA, 356 bp, Homo sapiens
ctgctgaggactcgatagcggtgccgcttgcctgccaatttgcccttgacgatctgggagccagagagaggcacatgccgcccattgaagctacagagagaaacagggagggcagaggcttaagtggaacaggagagggaaggttttttgattttttttttgtttttttttgagagagtcttgctctgttgcctaggctggagtgcagtggcatgatctcggctcactgcaatgtccacctcctgggttcaagcgattctcctgcctcagcctctcaagtagctgggattacaggcacctgccaccacgcccagccaatttttgtatttttagtagagacaatttcactatgttgg

SEQ ID NO: 8788 - DNA, 281 bp, Homo sapiens
  misc_feature (1)...(281): n = g, a, c or t
tttttttttttttttttttttttnganattcatattttatttacaagtaaatgaanactgtccctgtaaactctaatttgggatntgaanaacaatntaaanaagtagttgctggtgccacagtgatgtgtgaaggagtntatgccactgtttntttaaacagngattttgttattaaaaaaaaaacccacctacncnatttcttcatgtngcatatgtaaaataattaaaaataaaagngacttttnaaaactntacagtctgngatcaaatgcgtgagg

SEQ ID NO: 8789 - DNA, 580 bp, Homo sapiens
gggagtacacagaactctactttctgctcaatttttctgaaaatctagaattgctcttaaaagagctcttgagtatctatctaggagtggaactgctggatacagataatgcaaaccagttttctatatagttatgtaagaatctgaggctggacacagtgcctcacacctgtcattccagcactttggaaggcagaggcaggaggatcacttgagcccagaagtttgagattagcctgggaaacatggggagaccccaactctacaaaaatagtaaaatattagctgagcatggtggtgtgtgcctgttgtctgagctacttgggaggctgaggtggggaggatcgcttgagcctaggaggtcaaggttaccgtgagctatgattgtgtcactacagcctgtgtgacacagcaagaccctgtctcataaacaaacaaataaactaattaaggaaggagatatagtgaagaggacaggagccattgtggacgttccagttggtgaggagctgttgggtcgtgtagttgatgcccttggtaatgctattgatggaaagggtccaattggttccaagacgcg

SEQ ID NO: 8790 - DNA, 601 bp, Homo sapiens
ccaaaattttaaattacaacagattgttcaatttgatggatctctcagtaaacttcagtttgaaacaacaaaaaaatactgtttactaaaacataaaaaatgtttccaagaaattatcatccaatttgaaaaataaaaaatgtaacccatagtaagtaagaaaaatacaagagaaaatcaaactttgttggaatcaagagaataccatgaacttaaaaacttcctaaatcagtagcatatcctgtattaccatgtgtagaaaactgtaattaattaatgtaaggtagtttttattagttgcataacctaaaaatacaaggaaattttggaatatacctctaaaaagaccacgaaattgtcactgaaatacacatttcttgagacaatgggcaaacttcccatttatgggaaatatcttctttttttcacacagtgaaacagagaaaaattatatcaaatgagaaatatttttctctaaaataatcttcttaaatacctcaataatgcaatacttgggaaatgtaaattttcaaaactcagacttgaaataggttattattaaacaaatatacataaatcttattgcttggcacgatttttc

SEQ ID NO: 8791 - DNA, 601 bp, Homo sapiens
  misc_feature (1)...(601): n = g, a, c or t
ccattctaaagttggtgagtttgtcaagcaactatcgacttgatcagttcagccaagcaactgacaaatcaaaaacccacttgtcagttcagtaaaataatttggtcaaacaacagtctattgcattgatttataaatagttgtcagttcacatagcaatttaatcaagtaatcattaattagttaccccctatatataaatatatgtaatcaatttcttcaaatagcttgcttacatgataatcaattagccaaccatgagtcatttagaatagtgataaatagaatacacagaatagtgatgaaattcaatttaaaaaatcacgttagcctccaaaccatttaattcaaatgaacccatcaactggatgccaactctggcgaatgtaggacctctgagtggctgtataattgttaattcaaatgaaattcatttaaacagttgacaaactgtcattcaacaattagctccaggaaataacagttatttcatcataaaacagtcccttcaaacacacaattgttctgctgaagagttgtcatcancaatccaatgctcacctattcagttgctctgtggtcagtgtggctgcataacagt

SEQ ID NO: 8792 - DNA, 545 bp, Homo sapiens
  misc_feature (1)...(545): n = g, a, c or t
ctctgataaaacagactttaaaccaacaaagatcaaaagagacaaagaaggccattacataatggtaaagggatcaattcaacaagaagagctaagtatcctaaatatatatgcacccaatacaggagcacccagattcataaagcaagtccttagtgacctacaaagagacttagactcccacaaaataataatgggagactttaacaccccactgtcaacattagacagatcaacgagactgaaagtcaacaaggatacccaggaattgaactcagctctgcaccaagtggacctaataaacatctacagaactctccaccccaaataaagaggatatacatttttttcagcacaccacacctattccaaaattgaccacatatttggaaataaagcactcctcagcaaatgtaaaagaacagaaattataacaaactgnctctcagaccacagtgcaatcaaactagaactcaggattaagaaactcactcaaaactgntcaactacatggaaactgaacaacctgcttcctaagtgactac

SEQ ID NO: 8793 - DNA, 603 bp, Homo sapiens
  misc_feature (1)...(603): n = g, a, c or t
cctggttctggaatcctcagttcaaggttatcctacgcagagagccaggtaccaatgggtgcgctgcaatccagacagtaattctgcaaactgccttgaagaaaaaggaccaatgttcgaactacttccaggtgaatccaacaagatcccccgtctgaggactgacctttttccaaagacgagaatccaggacttgaatcgtatcttcccactttctgaggactactctggatcaggcttcggctccggctccggctctggatcaggatctgggagtggcttcctaacggaaatggaacaggattaccaactagtagacgaaagtgatgctttccatgacaaccttaggtctcttgacaggaatctgccctcagacagccaggacttgggtcaacatggattagaagaggattttatgttataaaagaggattttcccaccttgacaccaggcaatgtagttagcatattttatgtaccatggntatatgattaatcttgggacaaagaattttatagaaatttttaaacatctgaaaaagaagcttaagttttatcatccttttttttctcatgaattcttaaaggattatgctttaatgct

SEQ ID NO: 8794 - DNA, 360 bp, Homo sapiens
cgcaatgcctatgtctggagtcagaaagatggtgtttggaagccaaccctggtgatcctgagaattaatcgcgcagctacttttgtgaagtggtcccccctagagaacaaatttgctgtgggaagtggagcacgactcatttctgtttgttactttgagtctgaaaatgactggtgggtgagcaagcacattaaaaagccgattcgctccacagtcctcagcttggattggcatcccaacaacgttttgctggcagcaggatcatgtgacttcaaatgcagagtgttttctgcctacattaaagaagtggatgaaaagccagccagcacgccctggggcagcaagatgccttttgggcag

SEQ ID NO: 8795 - DNA, 447 bp, Homo sapiens
  misc_feature (1)...(447): n = g, a, c or t
gtccaggggnaattgagggaggctctaagctaggggcactgcatggtgggacaggatggccccttgaggactgaaccctggggagaagacaaacagtaataataaaaacaaataacaagtactttaagaatggattgtatgacctatagtgacagatgacatcactaatactgaaagctttttatattaataattttggcaaaatgtcattttgtaatatagtatatgctttccaggtgtgggggtggtaaagtaatgaggccaaaatcatcctgccccaagactaatatcttctaatggtgcattagcaaggaaggcagaaatcaatatttagatatcagtagagtacataatactgtagaaagaagaagagcacacatgagacagagaaggaggtggatgctcctgggttgagagcaaggggtgggggtgtggaagggactaggc

SEQ ID NO: 8796 - DNA, 422 bp, Homo sapiens
  misc_feature (1)...(422): n = g, a, c or t
ttttttttttttttttttagctgccatcttgcgtccccgcgtgtgtgcgcctaatctcaggtggtccacccgagaccccttgagcaccaaccctagtcccccgcgcggccccttattcgctccgacaagatgaaagaaacaatcatgaaccaggaaaaactcgccaaactgcaggcacaagtgcgcattggtgggaaaggaactgctcgcagaaagaagaaggnggttcatagaacagccacagcagatgacaaaaaacttcanttctccttaaagaagttaggggtaaacaatatctctggtattgaagaggtgaatatgtttacaaaccaaggaacagngatccactttaacaaccctaaagttcaggcatctctggcagcgaacactttcaccattacaggccatgctgagacaaagca

SEQ ID NO: 8797 - DNA, 202 bp, Homo sapiens
  misc_feature (1)...(202): n = g, a, c or t
gattaatnttgggacaaanaattttatagaaatttttaaacatctgaaaaagaagcttaagttttatcatcctttttttctcatgaattcttaaaggattatgctttaatgctgttatctatcttattgttcttgaaaatacctgcattttttggtatcatgttcnaccaacatcattatgaaattaattagattcccatgg

SEQ ID NO: 8798 - DNA, 576 bp, Homo sapiens
ctgtatgatttcagcagccaaagctggatgatggactgaaacattactatacaactgggacaaaacatatacaatatcacaatactaagcaaaaacgctttacacccaaagaaataaaacaggttacaaaatgtggagaatttagcaggcaaaactgtattacaagcaacattttaaatcatcatttttaatccattgcaactatttaaaacatctaaaacaaatataaaaatgagccttttagtattttactgacgtgatttttttgtctttaaatatttgttaaagcttgatgttatactcaaagtacatattatatagctaaaatgtcaagtgagaagagtgtatacaaagtggtccaagttttatttcaaactctgatttccaattaacccttctaagtattattctttaagttatagtttcatccatggtgaaaaagatttagaaggttgcctaaaattttcacatctatgtctttgagtaaataattagaccatgttgaaaattcccaggtctagtaaatcaggtttaaaatattctgaacttgtagaaataccaactggtaacagttgg

SEQ ID NO: 8799 - DNA, 374 bp, Homo sapiens
  misc_feature (1)...(374): n = g, a, c or t
tttttttttttttttttttttttttngattnaaaanattttattttctttatgcaggtaggcagttanaaatttcaaagtctaacaatgacattcttgaagngggcacagccttttaaactcaggctatgtntacagtaaccttgnggaactggttcanccanatcttnactttcatgaaagcncagggtctgtccttttntttccanagggctcctntcatattccatcgccagtttntgttacaaggcanactgaatcaagccaanatcaacacacactggtacacgtggntcccaaccaattttatatgtatatatatattctacttccaacacccgcattcatcctggttcaatcaaagcctggttttgg

SEQ ID NO: 8800 - DNA, 434 bp, Homo sapiens
ccacggccaaggaggatgctggcctggaaggggacttcagaagctacggggcagcagaccactatgggcctgaccccactaaggcccggcctgcatcctcatttgcccacatccccaactacagcaacttctcctctcaggccatcaaccctggcttccttgatagtggcaccatcaggggtgtgtcagggattggggtgaccctgttcattgccctgtatgactatgaggctcgaactgaggatgacctcaccttcaccaagggcgagaagttccacatcctgaacaatactgaaggtgactggtgggaggctcggtctctcagctccggaaaaactggctacattcccagcaactacgtggcccctgttgactcaatccaagctgaagagtggtactttggaaagattgggagaaaggatgcagagaggcag

SEQ ID NO: 8801 - DNA, 607 bp, Homo sapiens
  misc_feature (1)...(607): n = g, a, c or t
ggggaccgagtctttgtccactacactggctggctattagatggcacaaagtttgactccagtctggatcgcaaggacaaattctcctttgacctgggaaaaggggaggtcatcaaggcttgggacattgccatagccaccatgaaggtgggggaggtgtgccacatcacctgcaaaccagaatatgcctacggttcagcaggcagtcctccaaagattccccccaatgccacgcttgtatttgaggtggagttgtttgagtttaagggagaagatctgacggaagaggaagatggcggaatcattcgcagaatacagactcgcggtgaaggctatgctaagcccaatgagggtgctatcgtggaggttgcactggaagggtactacaaggacaagctctttgaccagcgggagctccgctttgagattggcgagggggagaacctggatctgccttatggtctggagagggccattcagcgcatggagaaaggagaacattccatcgtgtacctcaagcctanctatgcttttggcagtgttgggaaggaaaagttccaaatcccaccaaatgctgagctgaaatatgaattacacctcaagagtt

SEQ ID NO: 8802 - DNA, 414 bp, Homo sapiens
  misc_feature (1)...(414): n = g, a, c or t
aatgaangtgnacatctattnctnagggagtgtgnaggcacanaaactgttattngggcattctacgganggagatatnnttgancttgttgatggtcactttgataccaagattggacacaaagtagagagtgaaagttacngaaagattgcagacagcattgggtgctcaaccaacaacattttgtttctgacagatgttactcnagaggccagtgctgctgaggaagcagatgtgcacgtagctgtggtggtgagaccaggcaacgcaggattaacagatgatgagaagacttactacagnctcatcacatncttcagtgaactatacctgccttnctcaacctagagannggttgttaaggcagaccgccctgttccccanagttgtccctgtngtgtctaggtttattc

SEQ ID NO: 8803 - DNA, 504 bp, Homo sapiens
  misc_feature (1)...(504): n = g, a, c or t
gattgtancnatgttggtgtatctcgtgtacaagatggaaaagtgcttttgttgttctacctgatccagttgggggagcaggaatagggggtgcctgcctaacggcctctagcccatgtgcttatactgggatctgtcccgagggatctgcacctggttggcagtcattttgtggtggacgtggtaaatcgcgagtgttaccatgatgacgaggcccaagatgagccccaaaatcaggggcaaggtttcttccagttgcccccgctcatccactgggcatttatgctcttcactgaagacaaaatctgagataatgtcaaaaggttggatgtggaccgcagacaggatcatggtgaccgtcttctgcggatcactagaggccagtgaaatggtttgttgagcttgacactcataggacttcccagcgggggtgaccaaggcagagaggtggtgcgagttggctgtgtgcttcccagcactgactgcgtnttttgaagtgggttt

SEQ ID NO: 8804 - DNA, 205 bp, Homo sapiens
  misc_feature (1)...(205): n = g, a, c or t
atggngattgatgaggagcttctgggagatggacacagctatagtcctagagctattcattcatggctgaccagggccatgtacagccggcgctcgaagatgaaccctttgtggaacaccatggtcatcggaggctatgctgatggagagagcttcctcggttatgtggacatgcttggtgtagcctatgaagccccttcgctgg

SEQ ID NO: 8805 - DNA, 525 bp, Homo sapiens
  misc_feature (1)...(525): n = g, a, c or t
ccaattatttccaattnntattttattcttaaaacttaagcatggtaaaatgttaagctgttttcatccactgatattattctactataaaaagcccttcttgagcagatttgatgataaaaaggagaacatttctaaggtataattagagaagctgttgcatgagaaatcatgtctccatctccattttgctatgcgttatctgaggattgtttctgaaagagatctatttaggcagtgtatgtatgtgtcagcatgtaaaaagtaaagaactgaaaatagacaaaccttgtaaatgcacttcaaaaccaattgtggctcaagtgtaggtggttccccaaggctggtaccaatgagactggggtttgggaattagttggtcatcatccctcctgctgcccagcagtggtcagtcatttttcatgagggatggactaggaaaatgaagtgtctattataaggagagttcctgtaacttaaggagcaagctcactacaaaacccagctacctgcttatcgtagtgg

SEQ ID NO: 8806 - DNA, 399 bp, Homo sapiens
  misc_feature (1)...(399): n = g, a, c or t
cgccgccatgtccgacancgagaagctcaacctggactcgatcatcgggcgcctgctggaaggtgacatacacggccagtactacgaccttctgcgactatttgagtatggcggtttccctcccgagagcaactacctctttctgggggactatgtggacaggggcaagcagtccttggagaccatctgcctgctgctggcctataagatcaagtaccccgagaacttcttcctgctccgtgggaaccacgagtgtgccagcatcaaccgcatctatggtttctacgatgagtgcaagagacgctacaacatcaaactgtggaaaaccttcactgactgcttcaactgcctgcccatcgcggccatagtggacgaaaagatcttctgctgccacggagg

SEQ ID NO: 8807 - DNA, 603 bp, Homo sapiens
  misc_feature (1)...(603): n = g, a, c or t
ctgaaagatgagtttnttaaacttctgcagatttcactgtggggaaataagtgtgatctgtctctctcaggtggagaaagtagttctcagaataccaatgtactaaattcattggaagacctaaaacctttcattttattgaatgatatggaacatctttggtcattgcttagcaattgcaagaaaacaagagaaaaagcttctgctactagagtgtatattgttctcgataattctggatttgagcttgttacagatttaatattagccgacttcttgttgtcctctgaactggctactgaggttcatttttatggaaaaacaattccatggtttgtttctgatactactatacatgattttaattggttaattgaacaggtaaaacacagtaatcataagtggatgtccaagtgtggggctgactgggaagagtatattaaaatgggtaaatgggtttaccataatcatatattttggactctgcctcatgagtactgtgcaatgcctcaggttgcacctgacttatatgctgaactacannaaggcacatttaattttattcaagggtgatttgaattacaggaagttgacaggtgacag

SEQ ID NO: 8808 - DNA, 608 bp, Homo sapiens
  misc_feature (1)...(608): n = g, a, c or t
cctttggtcagagtnncagttggataaaccatgtgatttaatgtgaacatctgtttttgctctggaaggaggctggagtgagtagctcaatcagtctagagggtgctaaatgcttaggtaagggactctgataaaacttctggacacccaagctcagaggaactactctagtggacagcactttgcatgtgctgtcattcatcatttaggggaaaattaagtgtgtcctagtgtcattacactggaaagagacactaagaaatgtatgtctggcttctatttgccccatctgccatttccctttgcccttttgatctgtatcttttccctgaatgaacagtatccataaataccacaggctttctgagtcctctgagtttttctagtgaattgccaaaaccaaggattgttttggagtaaaacaaaactcaaacaaggctgttatgagaattaaatacaacagtgcatttaagatagtgcctggtatatgatacaaattcaatcaatttttgtagttatagttaccttaagccccttacatgttgcatgtntaaaactaacacaattgatagtcactctatttatttatctgngaactgnctttcttc

SEQ ID NO: 8809 - DNA, 330 bp, Homo sapiens
  misc_feature (1)...(330): n = g, a, c or t
ctgcatcccatgtgcgtcnatgggcaaagtatttgtagcactgcccttggaatttgtgccagccatagtcacatgtctcggtatcttgctcacaaagtgcaccaacataacttggaaggcagaggcacctgaatgtgttaaaaccatcaacacaagtggctccattacgacagggattagagtgacattcatcaaaatcaagttcacactggtctccgctgtatcctggcacacaggtgcatacgtaggaagtttcagtaggataacaggtgcctccgttaaggcacgggttcattttgcagcgatcaggtcctggtaaatagattgccg

SEQ ID NO: 8810 - DNA, 347 bp, Homo sapiens
cccgaagatgataccatccctgatgaggaacattttattgacatagaagatacaccaggatatcagactgccttctcacagttggcatttgctgggaaaaaagagcatgatcctgtaggtcaaatggtgaataaccccaaaattcacctggcacagtcacttcacaagttgtctaccgcctgtccaggaagggttccatcaatggtgagcaccagcctgaatgcagaagcgctccagtatctccaagggtaccttcaggcagccagtgtgacactgctttaaactgcatttttctaatgggctaaacccagatggtttcctaggaaatcacaggcttctgagcacag

SEQ ID NO: 8811 - DNA, 491 bp, Homo sapiens
  misc_feature (1)...(491): n = g, a, c or t
ggccagcctcagcctcccnaagtgctgggattacacgtgtgagtcaccacgccaggcaaggcatggatgttttccaaaaactccctaggggatcttgatatttatctaggtctggtctgaatcatatgatatgctttataactattatctacccatacatgtgtacatttctatccttcctatgttttttaaactgaggtataaattagataatgtacacatgttgatgaattttgatctaggtatacactgtgtacctatcacccagattaaaatatagaacgtttctcttccccaaaggtcattgctatcctgttaccaccttcagttttgcacgttcttgaacttcaggccagtgctgctgtggatgccagtggtttttttttcactgctgagctgtattctgttgtgtggatataccacaattttattatccatcctctgttgacagggttngtttccagtctttcactactgcaaataatgctgct

SEQ ID NO: 8812 - DNA, 617 bp, Homo sapiens
  misc_feature (1)...(617): n = g, a, c or t
atttgttatcagtgtacnnnctaattgagagcattncagtagtatcaaacaataatgtctactgtttatagtccacttaataaaaatagaggcatttactatttgccttaggctgataggaatgtgggttttcttgaccaaatatatcagcatctaattgaaatgaccaaatagcattcttagacttctgtattatgaatataattgatatttaaattaatgtcttgttcacatatgtgtactttcatatttgattttaaaatgtacattataacctgtatggtattttatttaaaggagataaacagccaaatagcaaataggtcactgaatgataagatttgcaccttagaacaataatcattttaaggataacaagtaaatgtctgaaagcatgaggggctttatttgcctttacctcatatgagtctttgatcttgaaccgatacttttggatctcattgttgatatacctgaatttactttgtaagagattttaacttcacttcatgctgatgatgtatcaaattcattttatagaaagatttaaagtttttttctggaagtgatatatgtcaaattncatttcctactgcagtatttgagcagggacagtc

SEQ ID NO: 8813 - DNA, 444 bp, Homo sapiens
  misc_feature (1)...(444): n = g, a, c or t
ccagttttgaggatcagangaagaaaggcttcctctgtgacattactttaatcgtggagaatgtacatttccgggcccacaaagccttacttgctgccagtagtgaatacttctcaatgatgtttgcagaagagggggaaatcggccaatccatttatatgctggaaggcatggttgcagacacctttggtatcctgctggaatttatctacacaggttatctccatgccagtgagaaaagtacagaacaaatcctggctactgctcagttcttaaaagtctatgacctggtaaaggcttacacagacttccaaaataatcatagctccccaaagccaacaactttgaacactgctggtgccccagtggttgttatctctaataagaaaaacgatcctccaaagcggaaacggggaagaccaaaaaaagtcaatacattgcagg

SEQ ID NO: 8814 - DNA, 618 bp, Homo sapiens
  misc_feature (1)...(618): n = g, a, c or t
ccacctggagacggnnattttgggcctattgaagacacctgctcagtatgacgcttctgagctaaaagcttccatgaaggggctgggaaccgacgaggactctctcattgagatcatctgctccagaaccaaccaggagctgcaggaaattaacagagtctacaaggaaatgtacaagactgatctggagaaggacattatttcggacacatctggtgacttccgcaagctgatggttgccctggcaaagggtagaagagcagaggatggctctgtcattgattatgaactgattgaccaagatgctcgggatctctatgacgctggagtgaagaggaaaggaactgatgttcccaagtggatcagcatcatgaccgagcggagcgtgccccacctccagaaagtatttgataggtacaagagttacagcccttatgacatgttggaaagcatcaggaaagaggttaaaggagacctggaaaatgctttcctgaacctggttcagtgcattcagaacaagcccctgtattttgctgatcggctgtatgactccatgaagggcaaggggacgcgagataaggtcctgatcagaatcatggtctcccgcagtgaagtgga

SEQ ID NO: 8815 - DNA, 613 bp, Homo sapiens
  misc_feature (1)...(613): n = g, a, c or t
ctgctcttgaaggacagngacttgttaccaccacaacagcagagcctgccatccccaacagatcaccagttgtccctgacatcgtgccctaccttgtctccctttgtggtctcctaaatgcccatctcgttggccttggttcggctagtggtatggaggggtgctgcctagcactgacctgagagtgtgtgtgacccactgacccaatggtgagaactgactgcccacctctccaactgattgttcaaagggtagaggagacaaagtgcagatctcaccctttcttggtattttcccttctacccttttggaagatagagtggctatttgaagttaaaggaaagggaaggggcacagaaacagtattacttggtgtgtttgtgtagtgggttttcttggggagggagaggagagttaagtactttaaaggatagaaagaaaataatgagacaagagagtttaggtgtgcttgggaactgtcttaggtaatgatcctggaagaggccagcttgtactggaacccagatatgcttaggagtcaaccttgacattgaagtcatttgcatttctttcctactggctaccagancctctcagtcatcatactgagact

SEQ ID NO: 8816 - DNA, 351 bp, Homo sapiens
  misc_feature (1)...(351): n = g, a, c or t
gtctttaaaccctgcgtngcaatccctgacgcaccgccgtgatgcccagggaagacagggcgacctggaagtccaactacttccttaagatcatccaactattggatgattatccgaaatgtttcattgtgggagcagacaatgtgggctccaagcagatgcagcagatccgcatgtcccttcgcgggaaggctgtggtgctgatgggcaagaacaccatgatgcgcaaggccatccgagggcacctggaaaacaacccagctctggagaaactgctgcctcatatccgggggaatgtgggctttgtgttcaccaaggaggacctcactgagatcagggacatgttgctgg

SEQ ID NO: 8817 - DNA, 385 bp, Homo sapiens
  misc_feature (1)...(385): n = g, a, c or t
cctcgtgcttcgccngcgcctcgtgcagcagcagcaggttgccctcgctcacagctctggttacttccgcaaactgcatcaggtgatactttttcaggagctccacagtgggcatgtgacccaatagcatttttactggaagcaaatagatcagaatcatccttttgttcttctgactagaacggtgacaatgctcaaaggcaaatgacaggtactcctcagcttgcttaaaatcgctgtcaaacatagccttgcgtccaacgtagtatttgtatgttactctctgtgcagtgctgtaatcgtctttcaggtttgagctgtcaattgctctaattaggggtttacataaatggagtttgttgatcttgaagtagattttaaacag

SEQ ID NO: 8818 - DNA, 575 bp, Homo sapiens
  misc_feature (1)...(575): n = g, a, c or t
ggctgaggcaggagaanngcgtgaacccgggaggtggaggttgcagtgagccgagattgcgccactgcactccagcctgggcgacagagcgagactgtctcaaaaaaaaaaaaaaaaaaaaaaaagaacggaatgtactgganatgtatttgataaccaaggttttaggtaaattttcaccagtattagttctatttgcaaactgaaaaatgttgtaggcttaatataaaataaccacattagtgaacattatatctcttanaanaaaggccatattttgctcctgcttctgtaaaaatattatttgtttgaaggggaaataatggtagtgtgacctttcacttaattcctactcccttaatgtgagagagacaaaatgagctgaagaaggaaaattctggagttacactccacaaccttgaacatactgacggacatctctgttttgacaacgatttctccatgccacccatgctctaatgccttgtggatcacggacaaccctntttgcacaagctacagcatcagcgatgttatcttgcancaaagcactgcaggataaatgacaggcatta

SEQ ID NO: 8819 - DNA, 161 bp, Homo sapiens
  misc_feature (1)...(161): n = g, a, c or t
atcatgaaaatgggtctgttgtgcgaagtgtctgccgctgtgcctgctgtgttatttttaactgatctantggggctcggccccatgtttgaaggccaaaaacntgtcggtgttnnttttttgtttttgttttagtaatgtgtaatttatccttgataacg

SEQ ID NO: 8820 - DNA, 620 bp, Homo sapiens
  misc_feature (1)...(620): n = g, a, c or t
tccagatttttgaaaaatncaatgtctaatggttatgaagaccacatggccgaagactgcaggggtgacatcgggagaacgaatttgatcgtcaactacctccctcagaacatgacccaggatgagttacgaagcctgttcagcagcattggtgaagttgaatctgcaaaacttattcgggataaagtagcaggacacagcttgggctatggctttgtgaactacgtgaccgcgaaggatgcagagagagcgatcaacacgctgaacggcttgaggctccagtcaaaaaccattaaggtgtcgtatgctcgcccgagctcagaggtgatcaaagacgccaacttgtacatcagcgggctcccgcggaccatgacccagaaggacgtagaagacatgttctctcggtttgggcggatcatcaactcgcgggtcctcgtggatcagactacaggtttgtccagaggggttgcgtttatccggtttgacaaacggtcggaggcagaagaggcaattaccagtttcaatggtcataaacccccaggttcctctgagcccatcacagtgaagttttgcagccaaccccaaccannaacaaaaacgtggcacttcctctcgcacct

SEQ ID NO: 8821 - DNA, 571 bp, Homo sapiens
  misc_feature (1)...(571): n = g, a, c or t
ctgggcacagtggctcncacctgtaattccagcactttgggaggccaaggcgggtggatcacctgaggtcaggcattcgagaacagcctggcccacatggcgaaaccccatctctactaaaaatacaaaaattagcccggtatggaggcatgtgcctgtaatcccagctacttgggaggctgaggcaggagaatggattgaacccaggaggcagaggttgcagtgagccaagattgcaccattgcactccagcctgggcaacagaacaagactccatcnaaaaaaaaaaaaaaaaaangaangaaagaagaaaagaaaattagccaggtgtggttgcatgcacctgtagtcccagcactttgggaggccaaggcaggaggatcaatcaaggctaggagtttgagactgcagaaagaaaccctgtctctaaaaaaaaggtccaggtaatttcagggtccagctccaccacaagcgcagctccaggggctgttgagttttgcctttatcattccaagtagtccctgctccanaccaagtnccaccatctggcagtcaggtcagtccaaccaca

SEQ ID NO: 8822 - DNA, 444 bp, Homo sapiens
  misc_feature (1)...(444): n = g, a, c or t
gtttctgctcgctcaaccnnnttgtcgtgttgccctcgcttctcagatccccgccggaagtgaagagagcaagcagatttgaacctatctgctttcaagctggtcatcatgatgaaacttagacacaaaaataaaaagccaggtgaaggttccaagggccacaagaagataagttggccctaccctcagcctgcaaagcaaaatgggaagaaagcaacctccaaagtgccctccgcacctcattttgttcaccccaatgatcatgccaatcgagaggctgaattaaagaagaagtgggttgaggagatgagggagaagcagcaagccgcccgggagcaaganagacaaaaacgcaggaccattgagagctactgtcaggatgtcctaagacgccaggaggagtttgagcataangaggaagttttgcaggaattaaatatgttt

SEQ ID NO: 8823 - DNA, 525 bp, Homo sapiens
  misc_feature (1)...(525): n = g, a, c or t
ccactacgataagcaggnnnctgggttttgtagtgagcttgctccttaagttacaggaactctccttataatagacacttcattttcctagtccatccctcatgaaaaatgactgaccactgctgggcagcaggagggatgatgaccaactaattcccaaaccccagtctcattggtaccagccttggggaaccacctacacttgagccacaattggttttgaagtgcatttacaaggtttgtctattttcagttctttactttttacatgctgacacatacatacactgcctaaatagatctctttcagaaacaatcctcagataacgcatagcaaaatggagatggagacatgatttctcatgcaacagcttctctaattataccttagaaatgttctcctttttatcatcaaatctgctcaagaagggctttttatagtagaataatatcagtggatgaaaacagcttaacattttaccatgcttaagttttaagaataaaataaaaattggaaataattgg

SEQ ID NO: 8824 - DNA, 624 bp, Homo sapiens
  misc_feature (1)...(624): n = g, a, c or t
ctgaaaatcttttagtaanagctttaaagatgagcccatgaattcactttaaatttcaccagttaaattaggtcaaatggaaggaactcaaatgagtattgcccaatcagagcccattatttgtaagtcatcagtaaccttaaaactccacttagacctaattattgaaaacttgcatataatgaagtgaaagaatttccattcatcaacctctcaatcccaggttttcaaagaaaaacctatctaaggaatacttaccaaaatcagataagaaaatttaaacctgcatagttatcagatttgttccactacaaccagtctgcatacagttacacatcaattcgttctgtatacactctagaactgaacagaacaaagtttagcatagaaaagctgtaagaaacaggttcctaattacggaagttgcaaagttcaaaagggtatgaaaaaaactaatgtaaattcgatacttccttcgtttcaaagaaatagactttctgtaaaaatatatacaatttttacaaatacatttacaagctgtcttaagaattgaggatatccatattcataactaattactgagccttccgtcaagtattattggtgataaactaggctaataaa

SEQ ID NO: 8825 - DNA, 619 bp, Homo sapiens
  misc_feature (1)...(619): n = g, a, c or t
ggcgcctcctgtcacncctgtatcgggggcaccaacgtgcgtgctgaggtgcagaaactgcagatggaagctccccacatcatcgtgggtacccctggccgtgtgtttgatatgcttaaccggagatacctgtcccccaaatacatcaagatgtttgtactggatgaagctgacgaaatgttaagccgtggattcaaggaccagatctatgacatattccaaaagctcaacagcaacacccaggtagttttgctgtcagccacaatgccttctgatgtgcttgaggtgaccaagaagttcatgagggaccccattcggattcttgtcaagaaggaagagttgaccctggagggtatccgccagttctacatcaacgtggaacgagaggagtggaagctggacacactatgtgacttgtatgaaaccctgaccatcacccaggcagtcatcttcatcaacacccggaggaaggtggactggctcaccgagaagatgcatgctcgagatttcactgtatccgccatgcatggagatatggaccaaaaggaacgagacgtgattatgagggagtttcgttctggctctancanagttttgattaccactgacctgctggacc

SEQ ID NO: 8826 - DNA, 620 bp, Homo sapiens
  misc_feature (1)...(620): n = g, a, c or t
ctgctcgggaggctganncacaagaatcgcttgagccagggaggtggaggttgcagtgagctgagatcacatcattgcactccagcctgggcaacgggcgagactctgtctcaaaaaaaagaaagaaagaaaaggtacatgtatatatttgtcctgcattatgttttttacttgatataaatgtatttttactgtgatagtccaagtgccctggggggcaggtgtgctctatgtggttcttcttccattggagagctggcgtagagatctgcagtgttcacaaggatgttggtttggagatgtctgctgctaggacctggggtgtgtgactcagtccatatgagagggacatctgggtggaggagtaaattcctgtgctctgaaatgccacttggtagctctggacaatgaaggacaattgactcaagggtgcctggcttctgctgctgctgggaaaaaattcagtttatagcattcctgcacctcccaaagtagataacctggaggtcattcagttaacaactgtccctgaggactcagttttgggggaggggttatctgggagaagctttancctgttctgagccattaggagacattagtgaanttggagcactgga

SEQ ID NO: 8827 - DNA, 254 bp, Homo sapiens
  misc_feature (1)...(254): n = g, a, c or t
caagctttttttttttnnntttttttttttttngcttattaaactagttttactttancaccgttcttagtggagcaggattcttgatcatggggnggaattttgtgtatctgggcttcatgggatgcataaaattttccagttggtaagcagcaggtgccgagggtctggatcanaaaaaaaggcaggcagccgggttcccactcnccttccatgagctntccgnagctcaccggccatcacttgaagcaaac

SEQ ID NO: 8828 - DNA, 300 bp, Homo sapiens
  misc_feature (1)...(300): n = g, a, c or t
ccattcanacaattgcccccttgtgggaatgcgggaatgaatggtacagtggacaccccagcaccattgacgttataaacatgtaaatgaaacacattagggcagacaatcaattgtctgtgagcattgcaaacctgcactccctctctctgtgacaggcacaaaatagtgtctaccttgggaagccacggtgctgagaggaaaaggacaaagaatttcctttcacacagaagaaaatgcaccttaaaagccttggaagaatgcagatgacaaaaactgttgcaaggaaaagaatctccc

SEQ ID NO: 8829 - DNA, 616 bp, Homo sapiens
  misc_feature (1)...(616): n = g, a, c or t
ccagtggaatgatgncccctgcaattaccatctcacctatacgtgcaagaaaggaacagtcgcttgcggccagccccctgttgtagaaaatgccaagacctttggaaagatgaaacctcgttatgaaatcaactccctgattagataccactgcaaagatggtttcattcaacgtcaccttccaactatccggtgcttaggaaatggaagatgggctatacctaaaattacctgcatgaacccatctgcataccaaaggacttattctatgaaatactttaaaaattcctcatcagcaaaggacaattcaataaatacatccaaacatgatcatcgttggagccggaggtggcaggagtcgaggcgctgatccctaaaatggcgaacatgtgttttcatcatttcagccaaagtcctaacttcctgtgcctttcctatcacctcgagaagtaattatcagttggtttggatttttggaccaccgttcagtcattttgggttgccgtgctcccaaaacattttaaatgaaagtattggcattcaaaaagacagcagacaaaatgaaagaaaatgagagcagaaagtaagcatttccagcctatcnnattnctttagt

SEQ ID NO: 8830 - DNA, 396 bp, Homo sapiens
  misc_feature (1)...(396): n = g, a, c or t
ctgactcaaggaccancnnatctttcttggctgctgtgttttctacccagcaaagggtccggtgggaaccccctcagccaaatgggagccactgacttctgtggggcccagaatctgactcaggcccagggaaatctgattcccacgtcaaagctcaggactcggagctgcactggttccgaacacagagcaggcataaagttctgatgccagaagaaggcaggaaactccaacgagctttaatcactctcccatcacgaacagctctagtgacagcttggcctttctatcccangagttcaaagagtttccatcgttcattctcacaaaggcccatgtcccctctgcctcgttcctgcttcactttattgaagtaactgtgaccccagatagaat

SEQ ID NO: 8831 - DNA, 162 bp, Homo sapiens
  misc_feature (1)...(162): n = g, a, c or t
ccaccantgagttactgggcccacatntgcctgcaagagggggaggggaattcangtaacccacaagaggggataaaagtncggggaagaaatctcctgtcaaggagtttgtttttgcagtggatcctctgnantgagantngntgtctntacaatatcatt

SEQ ID NO: 8832 - DNA, 432 bp, Homo sapiens
  misc_feature (1)...(432): n = g, a, c or t
ctggcattggtctananctttataaggccattcagcgagggaccatcaagtgcaactttgcgggggttgccttgggtgattcctggatctcccctgttgattcggtgctctcctggggaccttacctgtacagcatgtctcttctcgaagacaaaggtctggcagaggtgtctaaggttgcagagcaagtactgaatgccgtaaataaggggctctacagagaggccacagagctgtgggggaaagcagaaatgatcattgaacagaacacagatggggtgaacttctataacatcttaactaaaagcactcccacgtntacaatggagtcgagtctagaattcacacagagccacctantttgtctttgtcagcgccacgtgagacacctacaacgagatgccttaagccagctcatgaatggccccatca

SEQ ID NO: 8833 - DNA, 318 bp, Homo sapiens
ctgtcattccggtcatcacacaaccaatgttttcagttatcttgaataagtgagtcactgtgctggaatccaataatttgtcaggtactttcttctgtgtgacaattactgcacagtctttccctctgacagctactgatgtaaggccaccctggttaatagccttaaaagcatattctacttggtagagccgaccctcgggtgaaaaaatggtaatgtggcggtcaaaaccggcgctggaaccacgggacatgttggtacaagcactactttaaacacaatccctgggccccgtagctcccgcaccaggcacacaag

SEQ ID NO: 8834 - DNA, 560 bp, Homo sapiens
  misc_feature (1)...(560): n = g, a, c or t
ccagtgccattggtggcctctgaacaggcgctgggaaggtgttagtatgtggggctcttaccaatggagggaccaggttaggctgagagagaatctggggtgcaaactgtgtaggaaatggttgtgtcattctcacagtggcaggggctgactggaactgcttctggtagacaatgctgttcattttgctggactggctgttcggacttgtagaagtagcccggaagggactagatgttggtgtggtgcttctaccagcgattggaggtgtgcctggttttatatcaatgccacttccaaaggcttttagttccatttcagacatttttcctgtggttgcaatcatgctatgctgtgttccagcaggaattaatcctctgaaaggctggcttacttgtgcaggacgactcanactctgagcctgtgcttggggagtggtatgctgtaatgggggctgaagagtctgaggcaaagcaattagaggttgccctgtagatccaaaattaggcaaggaaagctgggatgctggtaaaggtactgtaacctgctggagagcactt

SEQ ID NO: 8835 - DNA, 254 bp, Homo sapiens
  misc_feature (1)...(254): n = g, a, c or t
ggaaaatccggattgncnnccagggagagaaaagaggcacacccggagctggtatccctcacctccaccactcagcaaggcgccggacagatatccggagggcactctgcctctgccggggggtttttttanaaaaggaatngcntagaanatacagcaagagggaactccacaacancaaaagtgttccatatcggaaaagccaaggttgtcatgttttgtttaaaaaanaaaancgncaaancncaaaacct

SEQ ID NO: 8836 - DNA, 347 bp, Homo sapiens
  misc_feature (1)...(347): n = g, a, c or t
ctgctagagatgtgcanggatgtctgtgaagccatggaatacctggagtcaaagcagttccttcaccgagacctggcagctcgaaactgtttggtaaacgatcaaggagttgttaaagtatctgatttcggcctgtccaggtatgtcctggatgatgaatacacaagctcagtaggctccaaatttccagtccggtggtccccaccggaagtcctgatgtatagcaagttcagcagcaaatctgacatttgggcttttggggttttgatgtgggaaatttactccctggggaagatgccatatgagagatttactaacagtgagactgctgaacacattgcccaagg

SEQ ID NO: 8837 - DNA, 449 bp, Homo sapiens
  misc_feature (1)...(449): n = g, a, c or t
cctggctcaacaaaanggctggggattggccctgaaaggagagagctgactgtcctggctgatggacaggagatcctcttagcactaccctaaggcaggcagttgggcattggtgtagacaacaggaaagtccaggctatagccgtactcaaaaacctttctgttccctttctgccagccctagggattgagtccacattcagcacaggactctctgggtacagctctctttaggaagacacaaattgcatggtgaagtcagttatatcctggccgcctttggtccctcccaggaagacgggcatgttttctgcttgagaggtgctgatgtaccagttggggaactgggcagactcaaattccagcttgttattgatttctatcttgttgaagacaaatcgcttttccatcttcttctttgggtaatttttgggatctacactctccag

SEQ ID NO: 8838 - DNA, 616 bp, Homo sapiens
  misc_feature (1)...(616): n = g, a, c or t
ctgtgagcccagctangacctcagaggggctgcgtctctgcactgcacgccccagggagactggagccctgaagcccctagatgtacagtgaaatcctgtgatgacttcctgggccaactccctcatggccgtgtgctacttccacttaatctccagcttggggcaaaggtgtcctttgtttgcgatgaagggttccgattaaaaggcaggtctgctagtcattgtgtcttggctggaatgaaagccctttggaatagcagtgttccagtgtgtgaacaaatcttttgtccaaatcctccagctatccttaatgggagacacacaggaactccctttggagatattccctatggaaaagaaatatcttacgcatgcgacacccacccagacagagggatgaccttcaacctcattggggagagctccatccgctgcacaagtgaccctcaagggaatggggtttggagcagccctgcccctcgctgtgaactttctgttcctgctgcctgcccacatccacccaagatccaaaacgggcattacattggaggacacgtatctctatatcttcctgggatgacaatcagctacatttgtgaccccggctacctgtta

SEQ ID NO: 8839 - DNA, 510 bp, Homo sapiens
tctaaaggtaaaccaatctttgacaatgccaatagcagtgtcaatgttcctaaatgttggctgtatctatctacttactcattgtattcttgaggtttctttcctttggtttctatgatattccacatccctctcttttcattccattgtgtgagttctctctgtggatcttttgttagctcctcttattccttcttgcctatctgagtttcctgaaattaccttcaaatcatgtctcgaaagatgttctaaagagacctttgaataagaacaacatttgtcccattaataaatggtgggagtttcatatatctgtttctttttctcttctttcctctttgccttgtccaaaagagtgggaactgagcagtacagtcataaattaattttaatatcttaacttaggcatcagtacactggctattgttccttaatacatttaacacatagtcattgactgctgattatgtgccaagggctgtgcttggcactggggataaagaagttatt

SEQ ID NO: 8840 - DNA, 574 bp, Homo sapiens
  misc_feature (1)...(574): n = g, a, c or t
ctggggtgggcttctcctactccgatgacaagttttatgcaactaatggcactgaggtcgcccagagcaattttgaggcccttcaagatttcttccgcctctttccggagtacaagaacaacaaacttttcctgaccggggagagctatgctggcatctacatccccaccctggccgtgctggtcatgcaggatcccagcatgaaccttcaggggctggctgtgggcaatggactctcctcctatgagcagaatgacaactccctggtctactttgcctactaccatggccttctggggaacaggctttggtcttctctccagacccactgctgctctcaaaacaagtgtaacttctatgacaacaaagacctggaatgcgtgaccaatcttcaggaagtggcccgcatcgtgggcaactctggcctcaacatctacaatctctatgccccgtgtgctggaggggtgcccagccattttaggtatgagaaggacactgttgtggtccaggatttgggcaacatcttcactcgcctgccactcaagcggatgtggcatcaggcactgntgcgctc

SEQ ID NO: 8841 - DNA, 222 bp, Homo sapiens
  misc_feature (1)...(222): n = g, a, c or t
ttggcttntaattcgcncntgtacttccttttttgacaataaaagagtcaagatagcaccgaggccaggagaaagggaacgtgtaagtttttatatatacagtttccaagccaacttcgggaagccttaacctttttacggggtgggggtggggaggtaaaaagttgtgatctctgagaaaataaccgccactactctggaagtgttcatcagcagttatac

SEQ ID NO: 8842 - DNA, 541 bp, Homo sapiens
  misc_feature (1)...(541): n = g, a, c or t
tataaactgtggacaannncctctgccgatggttttcaaggacctacttttgtcctgaccacttacaagcaaactctccacacatatgaaaactttgatttggaatatgaagagctatcagaatacaaattgtggttttcaatgtcatgcctgtggttattttaatagcatacccaaaagggtgttcttttatcttaagtatttacaataccttcagagtttcagttctttattttataaagcaatgaattttaataagaatattgaaatttcttccatttgaccttctgagagaaatggaaagaactccagcttgggtagcacagcaagactccatctctacaaatttttttttaaaaattagccaggcgtgcagcacacaccagtggtcccagctaccagggaggatgaggtaggaggattgaggatcgcctgagcccaggagttcgaggttacagtgagctcgaggttacagtaactgcagtggtgccactgcactccagcctgagctggagagctggagagcaatactccatcccta

SEQ ID NO: 8843 - DNA, 452 bp, Homo sapiens
  misc_feature (1)...(452): n = g, a, c or t
ccttttacntgctgatancnnaagcaatctgtgtgcatgtgtacatatgcatctgttttcagggaaagaaaagctgttaaagccaattaaggttatgaattcttgctactactttaatattaaacctttaagtgaaaatttattgaacactattacaaatgtggcaaactgacatagctggtttactgcacaaactttaatgtcaaagggattagatcagagctccagtctcacttactgggcctataacattgtgcagggcacttatctcacctcaggaaaatggaagtaactgcttcattttacagaggtnttaaatgaaagaaatgagaaaactataaaccaacattgaagcctgaattattgcttagtatttaaagtctagtacaatttgcaatgtttttaataaaaaaactcattgataggtgtatttttacagtgtatctaaaagc

SEQ ID NO: 8844 - DNA, 587 bp, Homo sapiens
  misc_feature (1)...(587): n = g, a, c or t
gggctgtctggcaggcnnnaaactacattcagttgagtctgcaagactgggaggaactggggtgataagaaatctattcactgtcaaggtttattgaagtcaaaatgtccaaaaaaatcagtggcggttctgtggtagagatgcaaggagatgaaatgacacgaatcatttgggaattgattaaagagaaactcatttttccctacgtggaattggatctacatagctatgatttaggcatagagaatcgtgatgccaccaacgaccaagtcaccaaggatgctgcagaagctataaagaagcataatgttggcgtcaaatgtgccactatcactcctgatgagaagagggttgaggagttcaagttgaaacaaatgtggaaatcaccaaatggcaccatacgaaatattctgggtggcacggtcttcanagaagccattatctgcaaaaatatcccccggcttgtgagtggatgggtaaaacctatcatcataggtcgtcatgcttatggggatcaatacagagcaactgattttgttgttcctgggcctggaaaagtagagataacctacanaccaagtgacgga

SEQ ID NO: 8845 - DNA, 573 bp, Homo sapiens
  misc_feature (1)...(573): n = g, a, c or t
gctgtccctgatgccgtnnaaagcagatactctagaacggaaggctcccttgatggaacttagacagcaaggccagatgcacatccctggaaggacatccatgttccgagaagaacagatgatccctgtatttcaagacctctgtgcacttatttatgaacctgccctgctcccacagaacacagcaattcctcaggctaagctgccggttcttaaatccatcctgctaagttaatgttgggtagaaagagatacagaggggctgttgaatttcccacataccctccttccaccaagttggaacatccttggaaattggaagagcacaagaggagatccagggcaaggccattgggatattctgaaacttgaatattttgttttgtgcagagataaagaccttttccatgcaccctcatacacagaaaccaattttcttttttatactcaatcatttctagcgcatggcctggttagaggctggttttttctcttttcctttggtccttcaaaggcttgtagttttgggtagtccttgttctttggaaatacacagtgctgaccagacagcct

SEQ ID NO: 8846 - DNA, 547 bp, Homo sapiens
  misc_feature (1)...(547): n = g, a, c or t
ctgagatgccccttcncttctgatgggttaaataagctgggaaattacccgagaagaccccggtaccacagtgtaaagcccaacgaaggggttgtttaatggtccaggggatacagaggctttaagaaacgtttccttaacgctaattcttatctggttaaacaaaacatagcaaaacatccccgatccgctcggcagaccatacacacccagcgacggcacttgatagttaatggggtttgttttaagcagatagaaaattttaagggagtcgaatcttgtgttgaatgcgttcgtgttgaatttgggccagtgtttccttgaagatcaaatgcaggttgcattttcctattgtttgtttaacagattgataggacaaactgaattagacttttcttcctgatgattcttggctcttctgcgctattattttaaaattccacgcctagattcatctatgctaataaagatgttgactttaagctttcaatttatagatgtagttgattaatatggggtatctgttttaaagagctttgttaagtgg

SEQ ID NO: 8847 - DNA, 607 bp, Homo sapiens
  misc_feature (1)...(607): n = g, a, c or t
ggagaacctgatcatnnattctgaactcaaagacgacttgcttttgtatcaggacgaggaggcgctgaacgactccattatttctggaacactgccacggaaatgcaagaaggagctcctggccgtgaagctaaggaaccggccaagcaaacaggaactagaagaccggaacattttccccagaaggattgatgaagaaagacaggagatccggcagcagatcgagatgaagctttccaaacggctgagccaaagacctgccgtggaagagctggagagaagaaatatcttgaaacaaaggaatgatcagacagagcaggaagaaagaagagaaatcaagcaaagattgacaagaaagcttaatcagagacccactgttgatgaattaagagacagaaaaattctgatacgattcagtgattacgtggaagtagcaaaagcgcaggactatgacaggagggcagacaaaccctggacgagactgtcagcagcagataaggcagcaattcgtaaagaattaaatgagtacaaaagtaatgaaatggaggtacatgcatcaagcaagcacttgacaagattccacagaccatagagattttcttctgag

SEQ ID NO: 8848 - DNA, 572 bp, Homo sapiens
  misc_feature (1)...(572): n = g, a, c or t
gaaggcaccnncttacagatggtctgtatcatcttcctgtgagtgctctcagtctgaatgatcatcttcaatattctatctagtgatggagtgagaaaattctcctgaactctgggcaggaagttcatattgctcagggtgagccaccatgataaaaataactcacacaggctaattacaattaatctaggctcttgacctttaaaaaatgtatataatgtttacatatgtttataatgtcacgccatttatttcatttaaaattttaaatgattttatctttggtcctctcttacaacttattcttggtacaacttattctttgtactataacagcagagatgagtaattgggacagactagcctccaaagcataaacttatttatgatttggccctttacagtaaaagtctgctcatcccaggntttgcttgtcaatttatatactggcgtttgttcctgatcctatttatttatttctggcatccaactctggtagtttctttctgaatcagtttaatgaagtttgtaaatgatngtaattaaacgttatttattacttttnatttttt

SEQ ID NO: 8849 - DNA, 582 bp, Homo sapiens
  misc_feature (1)...(582): n = g, a, c or t
ccactgtgaaaaancnnccccctcaaaacttcaggagaatgtatataataaatgaaggtacaatttcataccttcacaggattattgagaaggtcaaattacataacagatatgaaagcactgtgtaaactatgcggactatgctgcaccaaataactgtaaagaattattaactagactgtaaatgccttgagggcaaggaatgcatctgcaacgggtatttgtgaagtacttgacagtttgctaaggacttctgtggattttcctcatatgctactcataacaaccctggaaggtaaggggaattgttatcccaaattccaaataaagacactgcaggtcagacatcacacaggtggtaaatagcaattctggtacttactttagatattctgctacaggcttgctattcaaagtgtggtatgtagaccagcaacattgactctctgngctatctttcttttttataaactcggaattatttcaaaataagaagtttctaacaaaagagattcanaagagtcaaacccttgggtgtgaaaaagttttaggaagactttcctgaatttatttttgcctata

SEQ ID NO: 8850 - DNA, 466 bp, Homo sapiens
  misc_feature (1)...(466): n = g, a, c or t
ctgtctaatccctncnngaactgtttatagaagcttgagaatggggtaaaaatttctgctagcaaaatcaagttctttttgaaattttatnagtaatccagaatttagtagtccatgccttctcactcagcatttagaaataaaaatgtggtttcttaaacgtatatcctttcatgtatatttccacatttttgtgcttggatataagatgtatttcttgtagtgaagttgttttgtaatctactttgtatacattctaattatattatttttctatgtattttaaatgtatatggctgtttaatctttgaagcattttgggcttaagattgccagcagcacacatcanatgcagtcattgttgctatcagtgtggaatttgatagagtctagactcgggccacttggagttgtgtactccaaagctaaggacagtgatgaggaagatggcagtggacctcggccg

SEQ ID NO: 8851 - DNA, 340 bp, Homo sapiens
  misc_feature (1)...(340): n = g, a, c or t
ggaatgacnnnagacgtggctggaaagctggggccagatggcggagactcctcagctccacgttaacaacgtgctcccttggcaagccgtacagatcctttgaaggattttgagcagagaaatgacaagtttatactagaaacaagcagcatggaaggtaggctgcctgcatggagtctggaggaggagagcagcgcagagaatagtgtaaattcttcctgcaagtagtattgaggaggtacaaatgggaggatagaactggatttaaanagttttcagagagaagaaagtcaagtgaaataggacaaagagtccaaagtcagtccgtggtctccattcg

SEQ ID NO: 8852 - DNA, 492 bp, Homo sapiens
  misc_feature (1)...(492): n = g, a, c or t
taccaagacctgctcaatgttaagatggcccttgacattgagattgccacctacaggaagctgctggaaggcgaggagagcaggatttctctgcctcttccaaacttttcctccctgaacctgagggaaactaatctggattcactccctctggttgatacccactcaaaaaggacacttctgattaagacggttgaaactagagatggacaggttatcaacgaaacttctcagcatcacgatgaccttgaataaaaattgcacacactcagtgcagcaatatattaccagcaagaataaaaaagaaatccatatcttaaagaaacagctttcaagtgcctttctgcagtttttcaggagcgcaagatagatttggaataggaataagctctagttcttaacaaccgacactcctacaagatttagaaaaaagtttacaacataatctagtttacagaaaaatcttgngctagaatactttttaaaaggtat

SEQ ID NO: 8853 - DNA, 304 bp, Homo sapiens
  misc_feature (1)...(304): n = g, a, c or t
ttgtatatctcgttagtaatgtacatgctcttcaggttctagggctcctgttaggggagggagaaatgttgaatcaagagggaaaacaactactatgatttataaacatattttaatgtaaaaatttgcatttaaaaggagtggccctgttttctgtgttaaaaccccatttggtgctattgagtttgttctttattcttttatcccagtgaaaattgttgatcttgctgtanggaaaaattaaactctttgaatctccaaacaaggaagtttcagcattcccttatggatcagaggaacctta

SEQ ID NO: 8854 - DNA, 379 bp, Homo sapiens
  misc_feature (1)...(379): n = g, a, c or t
ggtcatgatgcagaagctactcaaatgcagtcggcttgtcctggctcttgccctcatcctggttctggaatcctcagttcaaggttatcctacgcagagagccaggtaccaatgggtgcgctgcaatccagacagtaattctgcaaactgccttgaagaaaaaggaccaatgttncgaactacttccaggtgaatncaacaagatcccccgtctgaggactgacctttttccaaagacgagaatccaggacttgaatcgtatnttcccactttctgaggactactctggatcaggcttcngctccggctccngctctggatcnggatctgggagtggcttcctaacggaaatggaacaggattaccaactagtnggacg

SEQ ID NO: 8855 - DNA, 491 bp, Homo sapiens
  misc_feature (1)...(491): n = g, a, c or t
ctggttctnnaatcctcnnntcaaggttatcctacgcagagagccaggtaccaatgggtgcgctgcaatccagacagtaattctgcaaactgccttgaagaaaaaggaccaatgttcgaactacttccaggtgaatccaacaagatcccccgtctgaggactgacctttttccaaagacgagaatccaggacttgaatcgtatcttcccactttctgaggactactctggatcaggcttcggctccggctccggctctggatcaggatctgggagtggcttcctaacggaaatggaacaggattaccaactagtagacgaaagtgatgctttccatgacaaccttaggtctcttgacaggaatctgccctcagacagccaggacttgggtcaacatggattagaagaggattttatgttataaaagaggattttccnaccttgacaccaggcaatgtanntangcatattttatgtaccatggttatatga

SEQ ID NO: 8856 - DNA, 469 bp, Homo sapiens
  misc_feature (1)...(469): n = g, a, c or t
ttagttttagctcttgtattcatgtctgtaatcaattgaagttaatttttaatatagtatgtgttgggagtccagcttcattgttttgcatgtatctatgcaattgacccaaagtgatttgttgaaaaatattattttctgatggtatggtcctgacacccttgtagaaattcaattgaagatatatgtatgagtttacttctgcagtctcaattctattctattggtctaaatgtttatctttatgccagtaccagcctgttttggttattttagttttgtaataaaatagacaaacatttggccgattaatcaagacaaaaagaaaagtatatagaaataatattatgaaagaaaagggggagcatattgaaaaacaccataaagattaaaaagattaagggacagtgttaacaatttatgccaataggttttgataattnatattttgctaggaatttgnctattt

SEQ ID NO: 8857 - DNA, 262 bp, Homo sapiens
aaaaatagaagatgaatcattgattgaatagttataaagatgttatagtaaatttattttattttagatattaaatgatgttttattagataaatttcaatcagggtttttagattaaacaaacaaacaattgggtacccagttaaattttcatttcagataaacaacaaataattttttagtataagtacattattgtttatctgaaattttaattgaactaacaatcctagtttgatactcccagtcttgtcattgccag

SEQ ID NO: 8858 - DNA, 418 bp, Homo sapiens
  misc_feature (1)...(418): n = g, a, c or t
ctgttaaatacctcccngcatttttttttcctgatttaatattgctatgaacaggaaagtgtgtaaaagtaaaaagtgtatactatttacagatttaaagctttctttgaccttgtcaagggttaagcgactcatttgcatttagtataatgatatgcaaatcttttactttgatgtgtgaaacttctgctatctcaaattgacagtatcattattttcagctatgatcatccgtttaagtaaatgttcccataattttgaggtccagatacaaagtgtatttctatggaagcttagtccttggctgattttccatcatgagaagtcttcaggcagattagttataacttcaaagtactgagaaacagagccaagagataaggtcgagctctattgttccagtattctcgggatccag

SEQ ID NO: 8859 - DNA, 509 bp, Homo sapiens
  misc_feature (1)...(509): n = g, a, c or t
gtggagaagagaaaannncagggcaggctggatggcatggctcacacctgtaatcccagcactttgggaggccatggagggaggattgaggccaggagtttgagaccagcctgggtgacattaaaagaccctgtctcaaagaaaacgaaaggagcagggtatatacaaggggtctgccagccttctcagcctttctgtgagaagcgagggtagggtagtacaggagagtggcaggaggtgacactaaaagtaggtctgtgttgatctaacgagtctcaactttactgccaaaactaatgaactaggaaagtttaggcagcaagggccagagatggagtctggacttgtattgcagaaagttcctgtgacggcagcttggagggtgaatgagagtgtgggatggaggggtgaatgggtgtggacagactggaaaaatgactcatgcagggaatgaggaaggnaggagccttgggagactctcaaatccctggcttagcctactgaattgc

SEQ ID NO: 8860 - DNA, 281 bp, Homo sapiens
  misc_feature (1)...(281): n = g, a, c or t
ctgctcggaggacnnntacagtgagctgctgcaggagatcacagacaacctgacgaagaaggagattcagatagagaagatccatttggacacgtcctccttcatggaggagctgcctggagagaaggaccttgcccacgtggtagagatctatgactttgaaccagcgctcaagacggaggacctgctggcaacgttttctgagttccaagagaaggggttcaggattcagtgggtggatgatactcgcgcactcggcatctttccctgccgggcctcag

SEQ ID NO: 8861 - DNA, 514 bp, Homo sapiens
  misc_feature (1)...(514): n = g, a, c or t
tccacatacaatatctgtgtaaaacgatttcctgtagaagtagctttaatggtttttgctctagaataccgtaggtctatccttagagcactcacgccatgctttcttccctgggttttaaacttcatataactttcagaaattggagagcaaaaattttgcttgtcactgcacatcaatataaaaaagcttatttaacttatcaaaacgtatttattgccaaactatgcttttttttgttaattttgttcatatttatcgggatgacaaatccatanaatatattcttttatgttaaattatgatcttcatattaatcttaaaattttgtgacgtgtctttttcctttttttccacagttttaatatattattcttcaacgacattttttgtaactttacacttttttggttattttattttaaaaaaatgaaaaattaatttaaanaaatnncaaaaaactgntggattatttattttagaaattcccccctttgtgttggactgcaaattg

SEQ ID NO: 8862 - DNA, 588 bp, Homo sapiens
gagcattttaaatagtacagtaggctggtatacattaggaaatggactgcactggaggcaaatagaaaactaaagaaattagataggctggaaatgcttactttctgctctcattttctttcattttgtctgctgtctttttgaatgccaatactttcatttaaaatgttttgggagcacggcaacccaaaatgactgaacggtggtccaaaaatccaaaccaactgataattacttctcgaggtgataggaaaggcacaggaagttaggactttggctgaaatgatgaaaacacatgttcgccattttagggatcagcgcctcgactcctgccacctccggctccaacgatgatcatgtttggatgtatttattgaattgtcctttgctgatgaggaatttttaaagtatttcatagaataagtcctttggtatgcagatgggttcatgcaggtaattttaggtatagcccatcttccatttcctaagcaccggatagttggaaggtgacgttgaatgaaaccatctttgcagtggtatctaatcagggagtttgatttcataacgaggtttcatctttccaaaggt

SEQ ID NO: 8863 - DNA, 132 bp, Homo sapiens
  misc_feature (1)...(132): n = g, a, c or t
aaacttgnttattatgtacaaatngattcttatantattatttaaatgantgcatttttaaatacaaggctttatatttttaactttaanatgtttttatgtgctntccaaatttnttttactgtttctnga

SEQ ID NO: 8864 - DNA, 581 bp, Homo sapiens
  misc_feature (1)...(581): n = g, a, c or t
ctgtgaaanagccaaaannncccaaactaggctgatactcctgtgttgacctgaggtcattntgtgcctgtcaaaccaaataacacattcaatcttttgtatatttngaagactcanaaacccanaaatttttanaacctntntctcactctaattaaaacctactgctctgtcaatgggaaagaatgagtccaaacattctgaaaaccgtacaaatgtgtttacattttagtgggggcttcctgcatctttaacctctttaaattgacataggtaagatcttgtgtaataacacatttgcaaatatgcagatgcattttcaaatgaatataatcctgatttagagaatattaactgactatcatagtagactatggataatactctaataattaattacaggttaacatttttaaaactcaaagcatatgctttaagtttatgctttaagccacgttatgttctacttcagcctaatacaagggagaaatttggagggggccctcctagctttctagtctcattattcccaaattagaaacattaccagcctaacactaactctggggtctaaaatgaag

SEQ ID NO: 8865 - DNA, 498 bp, Homo sapiens
  misc_feature (1)...(498): n = g, a, c or t
ctgtgaggagattcccnntcagacaactttgctgaaagcagcttggaaattcggtgtcgaagggtctgccacgttttcatgcttgcattttgggctccaaattggcactgggaaggggttactgagagcacaaggctgataccaggccctacttttaaacgttcatctacttacaatcctagtatttctctaaaaaccaaaacctctttgaattaacagtttcatgctgtgaatttctagtgggagatcttttccttgatattgacgacacaattttccatgtacttttaaagcagggagtggggaaaagtattttgaggggacattttcatcatcagttcagctttttttttttggttgttgctcttttttgggggggttgggtttgttggtttcactgaaacatttaactacctgtaaaatctaaacatggctgttagtgtcacaccaattcnggacacanaatggctaacactggaagtatgtnnnagagttcca

SEQ ID NO: 8866 - DNA, 231 bp, Homo sapiens
  misc_feature (1)...(231): n = g, a, c or t
gaaaaacangatggagnnccagggcaaccccaaataccgcgccctctctgagcaaggcgtctgcaccctagagatccggaaacccagcccctttgattctggggtctacatctgcaaggccataaatgtgctgggggaggcatctgtggactgccggctggaggtcaaagcctcagccgcacactgaagagtcacgggaggaggctgtgatgaggagccaggtgctgcagg

SEQ ID NO: 8867 - DNA, 606 bp, Homo sapiens
  misc_feature (1)...(606): n = g, a, c or t
cctaagaactgagacttncgacacaaggccaacgacctaagattagcccagggttgtagctggaagacctacaacccaaggatggaaggcccctgtcacaaagcctacctagatggatagaggacccaagcgaaaaaggtatctcaagactaaaggccggaatctggaggcccatgacccagaacccaggaaggatagaagcttgaagacctggggaaatcccaagatgagaaccctaaaccctacctcttttctattgtttacacttcttactcttagatatttccagttctcctgtttatctttaagcctgattcttttgagatgtactttttgatgttgccggttacctttagattgacagtattatgcctgggccagtcttgagccagctttaaatcacagcttttacctatttgttaggctatagtgttttgtaaacttctgtttctattcacatcttctccacttgagagagacaccaaaatccagtcagtatctaatctggcttttgttaacttccctcaggagcagacattcatataggtgatactgnatttcagtcctttcttttgaccccagaagccctagactgagaagataaaa

SEQ ID NO: 8868 - DNA, 550 bp, Homo sapiens
  misc_feature (1)...(550): n = g, a, c or t
ccacactctacttctgcntctgccacctatggggtcgaggcaggtgtggtgccttggctaagtccacagacttctgagaggcccacgctttcttcttctccagaaataaaccctgaaactcaagcagctttaatcagagggcaggattccacgatagcagcatcagaacagcaagtggcagcgagaattcttgattccaatgatcaggcaacagtaaaccctgtggaatttaatactgaggttgcaacaccaccattttcccttctggagacttctaatgaaacagatttcctgattggcattaatgaagagtcagtggaaggcacggcaatctatttaccaggacctgatcgctgcaaaatgaacccgtgccttaacggaggcacctgttatcctactgaaacttcctacgtatgcacctgtgtgccaggatacagcggagaccagtgtgaacttgattttgatgaatgtcactctaatccctgtcgtaatggagccacttgtgttgatggttttaacacattcaggtgcctctgccttccaagttatg

SEQ ID NO: 8869 - DNA, 580 bp, Homo sapiens
  misc_feature (1)...(580): n = g, a, c or t
ctgccgttctcacacngctctacttagactcaatagcagcaccattaagtatctagactttgtctttgctgtgaaaaatgaaaaccgattttatctgaaggaagtgaacatcagcatgtatttggttaatggctccgttttcagcattgcaaataacaatctcagctactgggatgcccccctgggaagttcttatatgtgcaacaaagagcagactgtttcagtgtctggagcatttcagataaatacctttgatctaagggttcagcctttcaatgtgacacaaggaaagtattctacagcccaagagtgttcgctggatgatgacaccattctaatcccaattatagttggtgctggtctttcaggcttgattatcgttatagtgattgcttacgtaattggcagaagaaaaagttatgctggatatcagactctgtaacactaatcaatacgtgatctctgttacaaaagaaaaaagcaagtacaagttccaacatgcaatactggtcaacttaaggtatatttagttgcagtccanctctttanaatgggtggnatgggggatttcaaacttaaa

SEQ ID NO: 8870 - DNA, 312 bp, Homo sapiens
  misc_feature (1)...(312): n = g, a, c or t
ctgttctcaacaanccnattttatttttttaatcaggcattgccagaaaattttgtacattaacctggaccagtgatggttctgtaccctctttgctgtgaaacacgacatgagctaaaggcaaagaccggttctcacaaggacaactgcttcaagttaggaaccagaacagtgcatttaaacagtcttcttagatattttcttgcctttcttaaaaaccagcttatttttaatgtagccacgcttccttttggtagtcttctttgacaaatacttctgttttgggaaaatgttggtgactcgaggtttgtg

SEQ ID NO: 8871 - DNA, 244 bp, Homo sapiens
  misc_feature (1)...(244): n = g, a, c or t
cctgtctaacctcncctgtggagtctgcgtgggcatcgtgggcagtggggctgccctggccgatgctcanaaccccagcctctttgtaaagattctcatcgtggagatctttggcagcgccattggcctctttggggtcatcgtcgcaattcttcagacctccagagtgaagatgggtgactagatgatatgtgtgggtggggccgtgcctcacttttatttattgctggttttcctgggacag

SEQ ID NO: 8872 - DNA, 437 bp, Homo sapiens
  misc_feature (1)...(437): n = g, a, c or t
cctcacgcanaaactagnncngttcatgaaaacccgagatactctgccagcttcttgaggaagcantgttgncacacttttctgagcttcantgattcacacattttgataagacagcatgttctgtgggttaagtacatttaccttttnaaaatatactcccatgaagtatcatggttcagaattacacacttacaaagttaaatggcataaaactactttgtaaaaagtgcctacactctaaaaggtgatttaaaggtttatgacatcttaattcaagtgaatactgaatcagtaggattatagagcaggtgctctaagttagggaatctggagtcagtctctcctttgcttatgtgcaatgtggacccagggatttctcaatttctctgtcagaatttttaacatggtaaaatggctattattatatggaatga

SEQ ID NO: 8873 - DNA, 363 bp, Homo sapiens
  misc_feature (1)...(363): n = g, a, c or t
gccgccgcggactccggcnnctttatcgccagagtccctgaactctcgctttctttttaatcccctgcatcggatcaccggcgtgccccaccatgtcagacgcagccgtagacaccagctccgaaatcaccaccaaggacttaaaggagaagaaggaagttgtggaagaggcagaaaatggaagagacgcccctgctaacgggaatgctaatgaggaaaatggggagcaggaggctgacaatgaggtagacgaagaagaggaagaaggtggggaggaagaggaggaggaagaagaaggtgatggtgaggaagaggatggagatgaagatgaggaagctgagtcagctacgggcaagcgggcag

SEQ ID NO: 8874 - DNA, 537 bp, Homo sapiens
  misc_feature (1)...(537): n = g, a, c or t
catcaagagatacttcaccctcaagtggttcagcagtttcttcatcaaaggtgttagacaaacccagtaggctaactgaaaaggaacttgctgaggctgcaagcaagtgggctgctgaaaagctagagaaatcagatgaaagtaacttgcctgaaatttctgagtatgaggcgggatccacagcaccattgtttactgaccagccagaggaacctgagtcaaacacaacacatgggatagaattatttgaagatagtcagctaaccactcgctctaaagcaatagcatcaaaaaccaaagagattgaacaggtttaccgacaagactgtgaaactttcgggatggtggtgaaaatgctgattgaaaaagatccttcattagaaaagtctatacagtttgcattgaggcagaatntacatgaaataggtgagcggngtgttgaagaactcaagcatttcattgcagagtatgatacttccactcaagattttggagagcctttttagattttttctgcttcaggctaaaaaaaaaaaa

SEQ ID NO: 8875 - DNA, 585 bp, Homo sapiens
  misc_feature (1)...(585): n = g, a, c or t
ccacactctacttctgcnnctgccacctatggggtcgaggcaggtgtggtgccttggctaagtccacagacttctgagaggcccacgctttcttcttctccagaaataaaccctgaaactcaagcagctttaatcagagggcaggattccacgatagcagcatcagaacagcaagtggcagcgagaattcttgattccaatgatcaggcaacagtaaaccctgtggaatttaatactgaggttgcaacaccaccattttcccttctggagacttctaatgaaacagatttcctgattggcattaatgaagagtcagtggaaggcacggcaatctatttaccaggacctgatcgctgcaaaatgaacccgtgccttaacggaggcacctgttatcctactgaaacttcctacgtatgcacctgtgtgccaggatacagcggagaccagtgtgaacttgattttgatgaatgtcactctaatccctgtcgtaatggagccacttgtgttgatggttttaacacattcaggtgcctctgccttccaagttatgttggtgcactttgtgagcaaggataccgagacatg

SEQ ID NO: 8876 - DNA, 241 bp, Homo sapiens
ctggcccgacctctggccccctcttccctggctgaatgtaaatatttaccagcatttagaaaaaaggagaaaaaagacagaactaaacccgtttaggaaaaagggaccgagggacagcagtggttaagtaatccactgaggacctgaaggggaaaatggacttacctttctcatatacttggcctggctagggcactgggtgccagacagccttctgaggggattttctttctaaatgagg

SEQ ID NO: 8877 - DNA, 579 bp, Homo sapiens
  misc_feature (1)...(579): n = g, a, c or t
tgaacatgtagtcacagnntcaccaatcaaaaaggaagaaagtacaaaacattttccgaaaggcatgagaccaacaattcaagagtcagatactgagctcttattctctggactgggatcaggagaagaagttttacctactctaccaacagagtcagtgaattttanntgaagtggancanatcaataacacattatatccccacacttctcaagtggaaagtacctcaagtgacaaaattgaagactttaacagaatggaaaatgtggcaaaagaagttggaccactcgtatctcaaacagacatctttgaaggtagtgggtcagtaaccagcacaacattaatagaaattttaattgacactggagcagaaggacccacggtggcacctctccctttctccacggacatcggacatcctcaaaatcagactgtcaggtgggcagaagaaatccagactagtagaccacaaaccataactgaacaagactctaacaagaattcttcaacagcagaaattaacgaaacaacaacctcatctactgattttctggctagagcttatggttttgaaatgg

SEQ ID NO: 8878 - DNA, 264 bp, Homo sapiens
  misc_feature (1)...(264): n = g, a, c or t
ggctgctctgggattcncntcagccaatcttcattgctcaagtgtctgaagcagccatggcagaagtacctgagctcgccagtgaaatgatggcttattacagtggcaatgaggatgacttgttctttgaagctgatggccctaaacagatgaagtgctccttccaggacctggacctctgccctctggatggcggcatccagctacgaatctccgaccaccactacagcaagggcttcaggcaggccgcgtcagttgttgtgg

SEQ ID NO: 8879 - DNA, 428 bp, Homo sapiens
  misc_feature (1)...(428): n = g, a, c or t
ctgagcatccagatnncnagtccctgacactgtttaaccacacagtgagagctgccaaatgagaccagcagaaaaactgtccagctagccccaggtaatccatacagtcgtgacagatagacagatgtgtagttttaggccattaggttttgggataattggttaagcaacaataaataaccaaaacaaaacttaaagttatgacagtccaaataaaatttcctgaaagtcgaaagataagaaaatattccagaactgaaaatttaaaaaacatttagaaataacgtgagatataagactcaagacaagaggtctaaaatccaattaacagacacttccaaatgaacaaataaaatggaaaagagaaagttaacaacaaaaatatgacaagattcaagactccaactttgaaagagcctatccatagg

SEQ ID NO: 8880 - DNA, 328 bp, Homo sapiens
  misc_feature (1)...(328): n = g, a, c or t
agatttgantatttancctgcncaaaggccaatcttcanttatcaatgacaagaaaactctagggctgccaaaataacttnattttanaccccanagttagtgttaggctggtaatgtttctaatttgggaataatgagactagaaagctaggagggccccctccaaatttctcccttgtattaggctgaagtngaacataacgtggcttaaagcataaacttaaagcatatgctttgagttttaaaaatgttaacctgtnattaattattagagtattatccatagtctactatgatagtcagttaatattctctaaatnagattat

SEQ ID NO: 8881 - DNA, 579 bp, Homo sapiens
  misc_feature (1)...(579): n = g, a, c or t
tagagataggaacggtgggtggtgggaccaacctactacctcagcangcctgtttgcagatgctaggtgttcaaggagcatgcnaagataatcctggggaaaatgcccggcngcttgcccgaattgtgtgtgggaccgtaatggctggggaattgtcacttatggcagcattggcagcaggacatcttgtcaaaagtcacatgattcacaacaggtcgaagatcaatttacaagacctccaaggagcttgcaccaagaagacagcctgaatagcccgacagttctgaactggaacatgggcattgggttctaaaggactaacataaaatctgtgaattaaaaaagctcaatgcattgtcttgtggaggatgaatagatgtgatcactgagacagccacttggtttttggctctttcagagaggtctcaggttctttccatgcagactcctcagatctgaacacagtttantgctttacatgctgtgctctttgaagagatttcaacaagaatattgtatgttaaagcatcagagatggtaatctacagctcacctctgaaggcaaatataagctgggaa

SEQ ID NO: 8882 - DNA, 324 bp, Homo sapiens
  misc_feature (1)...(324): n = g, a, c or t
ctgggatccgccgnccagcgggcggttcagggctcccggtactcctgcgtgttaatgagaacgttcattagcgctcttgacaggacggcgactgtgagacgcctggttacctattttagtaaatcgggaacactggatgcaaggcggttggttttcgtttttaagcaagcttaaatgttggttacgctacttttggggaaagggaaacgaaaggtgaatctcgagttctaagttgctttctaagaaacccccaggatttaagagcgaaaactctctgcgacaaaacactggatacgcgagtcttaaatacagctctccaaacag

SEQ ID NO: 8883 - DNA, 599 bp, Homo sapiens
ctgttgccaagacagagattgctttaagtggcaaatcacctttattagcagctacttttgcttactgggacaatattcttggtcctagagtaaggcacatttgggctccaaagacagaacaggtacttctcagtgatggagaaataacttttcttgccaaccacactctaaatggagaaatccttcgaaatgcagagagtggtgctatagatgtaaagttttttgtcttgtctgaaaagggagtgattattgtttcattaatctttgatggaaactggaatggggatcgcagcacatatggactatcaattatacttccacagacagaacttagtttctacctcccacttcatagagtgtgtgttgatagattaacacatataatccggaaaggaagaatatggatgcataaggaaagacaagaaaatgtccagaagattatcttagaaggcacagagagaatggaagatcagggtcagagtattattccaatgcttactggagaagtgattcctgtaatggaactgctttcatctatgaaatcacacagtgttcctgaagaaatagatatagctgatacagtactcaatgatgatgat

SEQ ID NO: 8884 - DNA, 608 bp, Homo sapiens
  misc_feature (1)...(608): n = g, a, c or t
ccttattttctgagccaaccgaggcaggagacactacaacacaaaaaaatgtgaaccacagagaccaccaagtacaaaaactgcaaactcataagcattaaaaaacattgggtggaactggttagagcacattagaataatttaccagaacttgtgcagagaaaagaatgaagactggtggggaataattgacaggttctgctcccccagcttaactatcattgtgaaggttaaaataaaagaagatatgaagctctagcataataaagaacacagcagaggctatatataaaaaagttaacataaaaatctgacaggtgaaggaatagaatatcctgggaaaagcaagaactacttactaaaacctttgtttttccacttggaatctgcatacttatattgaactaataaagtattgctatgaacaaactagtagaatgaattattttaacttctcaagaccctgatatagagctatccattttgcattctaaaccctctccaggctaattgacaaaggataataccagaaatagatcaggagttaaattatagttagaaaggggagagaagtaaggnaggacattaaaattttattctgaaattat

SEQ ID NO: 8885 - DNA, 314 bp, Homo sapiens
  misc_feature (1)...(314): n = g, a, c or t
gggaaccaaagctntcatggatgaggtggtgaaagccacttctaggggctgcatcaccatcataggtggnngagacactgccacttgctgtgccaaatggaacacggaggataaagtcagccatgtgagcactgggggtggtgccagtttggagctcctggaaggtaaagtccttcctggggtggatgctttcagcaatatttagtactttcctgccttttagttcctgtgcacagcccctaagtcaacttagcattttctgcatctccacttggcattagctaaaaccttccatgtcaagattcagctagtgg

SEQ ID NO: 8886 - DNA, 608 bp, Homo sapiens
gttggtaaagaatacaggagcagaaccgggcatggtggctcagcctgtaattccagcactttgggaggctgaagtgggcagatcacttgaggtcaggagattgagaccagcctggctaacatggtgaaaacctgtctctactaaaaatacaaaaattagctgggtgtggtggcatgcacctgtaatcccagctatttgggaggctgaggcaggagaattgctcaaaataaaaaaaaaaaaataaagaactaaaaagtgtggatactgttatgccacatgtgataataaaatattcaaggccacagatgcaagtcaccaacttacaaagagaatactgaaggtagggtacattaaaaaaatagagaaatgcaataaagaaaatgccacctctgcctaaatcaggaaagagtaaatgcataggcattaaaacagcagctctgcatactacactgcatttctctttgtcaaaaagaattcactgtgtatcattacaaaggtcagtgaataagacgaggcaataaacgtagcgccttggtattagggcaaatttagttttcttttcattttacacatgagggggaaaaaagaagtgtagaactaggaatgct

SEQ ID NO: 8887 - DNA, 592 bp, Homo sapiens
  misc_feature (1)...(592): n = g, a, c or t
actgccttgaagaaaaaggaccaatgttcgaactacttccaggtgaatccaacaagatcccccgtctgaggactgacctttttccaaagacgagaatccaggacttgaatcgtatcttcccactttctgaggactactctggatcaggcttcggctccggctccggctctggatcaggatctgggagtggcttcctaacggaaatggaacaggattaccaactagtagacgaaagtgatgctttccatgacaaccttaggtctcttgacaggaatctgccctcagacagccaggacttgggtcaacatggattagaagaggattttatgttataaaagaggattttcccaccttgacaccaggcaatgtagttagcatattttatgtaccatggttatatgattaatcttgggacaaagaattttatagaaatttttaaacatctgaaaaagaagcttaagttttatcatcctttttttctcatgaattcttaaaggattatgctttaatgctgntatctatcttattgttcttgaaaatacctgcattttttggtatcatgttcaaccaacatcattatgaaattaattag

SEQ ID NO: 8888 - DNA, 570 bp, Homo sapiens
accacatcatcctcacgtgttcggtactgagcagccactacccctgatgagaacagtatgaagaaagggggctgttggagtcccagaattgctgacagcagaggctttgctgctgtgaatcccacctgccaccagcctgcagcacaccccacagccaagtagaggcgaaagcagtggctcatcctacctgttaggagcaggtagggcttgtactcactttaatttgaatcttatcaacttactcataaagggacaggctagctagctgtgttagaagtagcaatgacaatgaccaaggactgctacacctctgattacaattctgatgtgaaaaagatggtgtttggctcttatagagcctgtgtgaaaggcccatggatcagctcttcctgtgtttgtaatttaatgctgctacaagatgtttctgtttcttagattctgaccatgactcataagcttcttgtcattcttcattgcttgtttgtggtcacagatgcacaacactcctccagtcttgtgggggcagcttttgggaagtctcagcagctcttctggctgtgttgtcagcac

SEQ ID NO: 8889 - DNA, 470 bp, Homo sapiens
  misc_feature (1)...(470): n = g, a, c or t
tatcttcccactttctgaggactactctggatcaggcttcggctccggctccggctctggatcaggatctgggagtggcttcctaacggaaatggaacaggattaccaactagtagacgaaagtgatgctttccatgacaaccttaggtctcttgacaggaatctgccctcanacagccagnacttggntcaacatggattannaagaggattttatgttataaaagaggattttnccaccttgacaccagncaatgtanttagcatattttatgtaccatggttatatgattaatcttgggacaaagaattntatagaaatttttaaacatctgaaaaagaagcttaagttttatcatcctttttttctcatgaattcttaaaggattatgctttaatgctgntatctatcttattgnttcttgaaaatacctgcattttttggtatcatgttcaaccaacatcattat

SEQ ID NO: 8890 - DNA, 295 bp, Homo sapiens
ttttaaatattttattttcctgttctttgtgaaaacatcaataaatatcgaaacctctctgctctaacacagagggaaacactgcataattaacattaaacaaggcagtatgccttacaagaaagacataaaatgtccaagggatatttagaacattttagttcttaaagcttcaacatgagaaatgttgaccacacactgtgaaatcatttcaataaataacaactgacattcatctttacagttacaaaatagacacacatacatttccctgccgtcacattgatcttactgg

SEQ ID NO: 8891 - DNA, 527 bp, Homo sapiens
ttaagaacatcactcttttaagagcctccaaaaatcaggagattcaggtaagtgtcctatcaagatttatcactgataagtctagatcatcatgaagtacattggaaaggcaacaggaagcaaagtaagcccgaagattctaagggaagcaactcctttctacataggcatttaaggcatttactgctagcaagctttccctaggaaactgaaaaagagatttaacgtccatcaaaagtaaaggaagaactttctcctggtgtggcagaagtatgtgtttttaattagtcattgattagaagtattggtatcaagatggaaatgatgatgattttcaatttcaaggaagagattatattcctcatatgtattctgccaacaggttttgttttttaaaatattttgaacagaaaatataattcataaacttaatcctctaaaaatcacaataggaagtcagctaaactaactctaatccaaccattctagtatatactatccaagggctgaagtgtcaggcaatgact

SEQ ID NO: 8892 - DNA, 604 bp, Homo sapiens
ccacgaagcaccgccaggacagttttcaaggaagagaaagtaaagggtctccaaagaagcggctggatgtccgtctgtcgagaacgtccagcgtggagcggggcaaggagagggaggaggcttggagctttgacggggcattggagaacaagcgaactgccgctaaggaatctgaggagaacaaggagaacctgatcataaattctgaactcaaagacgacttgcttttgtatcaggacgaggaggcgctgaacgactccattatttctggaacactgccacggaaatgcaagaaggagctcctggccgtgaagctaaggaaccggccaagcaaacaggaactagaagaccggaacattttccccagaaggactgatgaagaaagacaggagatccggcagcagatcgagatgaagctttccaaacggctgagccaaagacctgccgtggaagagctggagagaagaaatatcttgaaacaaaggaatgatcagacagagcaggaagaaagaagagaaatcaagcaaagattgacaagaaagcttaatcagagacccactgttgatgaattaagagacagaaaaattctgatacgattcagtga

SEQ ID NO: 8893 - DNA, 270 bp, Homo sapiens
  misc_feature (1)...(270): n = g, a, c or t
tcgacattctttttgttactgatacgtttaatngttntgtttgtaaggttccanaatatcttaaccatgtaagtaaacgcttanaggaagagggagacagagtaatcacttacttggaccacagcacacagtaagtaccgtttgctcnctgagcgttcntatcttcaccgnggctggaaggtnctcctgnctggttattgaaataaagggtgtctttgtcaattcattcagtnctaagagngnttntgcacctagcatattttactttgt

SEQ ID NO: 8894 - DNA, 597 bp, Homo sapiens
ccatccctggcactgagcccatgctgttcatctggacagagtggttcattggggaggctgcacgaggtcccatgggtgcttgtggcaactggacgttccccaaggacatggggttaaatgaattcatcccttgagaaacttgcatgcgattcactggcagggacaggggtccatttggaggtctcacaggttgtgcctgtggaatcacagggggctgagcccccggggctggtaaggctggctggttccccaagatgccttgtttatgtaaacgcgacctccgtttttcttctagttctttttgtatcttgtagattttctctgctaataagtgataatattcatccctgctgttggcagactcgtacatgtccccttccactttcttagcataggctaccaggttttccatgcggcgatcctttagagctgcgggatcaggtgttgggaagatggcttggacgagtttatgcactagatggctccgcaggtcctgagtgacatgttcgtgccagcctttccttacaccggtgctagaaggaggagctgctgttggtatagtgctgagggttccaatgttaccagagttggagccat

SEQ ID NO: 8895 - DNA, 435 bp, Homo sapiens
ccttcccactctttgtagtgccaggaaaatactgaatgtaagtgggtgcagctttgctcgctgtgaggagcagcagaatgcggcagcctctcctcccagaatctaggaatctgggaggcacaggacatccccaaaaggtcccaaacagttccagaccctatgtcttaccctccaccctaccagggaatgactatctacactaatgaagggctactgcccccatggctgaagccacagaatggtacaggagagaagactgtaatttgtgaccagaaacaggcaagctgtccctcccagccccaaagaatgggaacctgcccaccagtggcaccagggctgggggctaggagagatggcatccatcaaggagcccttaagaggctgcatctttaaggaccaggaaatgagtccatcagttaccaaggcttctcacag

SEQ ID NO: 8896 - DNA, 384 bp, Homo sapiens
  misc_feature (1)...(384): n = g, a, c or t
ctggtgcancttgcctcaatatcttatcactaagtgcattcctggacctgctttgagtcagtttacactanttatgcaattaagggtggaaggtaaagggggctgcacgtgaagaaactaaaatggagtctgtccggctctctctccgctaggagagagtcactcaggttaaaacaaggtagggtatcacaggaccatgtacaattcttcaaactccagcttcaactctctttcttattgctctcttaggacagtatatttagatcagagtaaatgaaagtaatgttattangagataagattaaaattgatcccatttgtaaaaagggaagtagattatttgtgaactgtaatactttttttactgaagaatcaccttaaaac

SEQ ID NO: 8897 - DNA, 593 bp, Homo sapiens
ctgactgactttgggcaaattccttcctctttccagatgccagtttctcaacaataaagtgagggagctttgctccgatttccctccttctcttactgcctaaacttgtcagatagaacttcaagtttgcttcaccttaggtcctgattgccaccacagtggggacagcagggacggtccccaagcctgaagcaagaagaggacagagaaggatgaactgcaggagactttgcctaagcagaaatccaaaccccatttttccctaaagatgaggcatcttacttcaaggacatttgtcaagttgttaaagttcccttgatggtctctcagaagccctggaacttctggaaatcacttgaactgtgataagaattctccttagagctgcctgagaatagcaggacacggcaggcgaggagggggagtcacctgctgccttaatcctctcagacagaaatgaaatttctcccaccgaagggtttccttgggcttcagggagctcacaaagctgcttgctagaaagaatatttagtccaagctgggaggagtggtgattttgataagaaaatcaagagccccattcacgttcccag

SEQ ID NO: 8898 - DNA, 600 bp, Homo sapiens
  misc_feature (1)...(600): n = g, a, c or t
ccatcttcccatctcccatgatgtatgctggaccaactgaggtccagtggcattgcagagcacggatggttgcaggagccaacttttacattgttggacgagaccctgctggcatgcctcatccagaaacagggaaggatctttatgagccaagtcatggtgccaaagtgctgacgatggcccctggtttaatcactttggaaatagttccctttcgagttgcagcttacaacaagaaaaagaagcgtatggactactatgactctgaacaccatgaagactttgaatttatttcaggaacacgaatgcgcaaacttgctcgagaaggccagaaaccacctgaaggtttcatggctcccaaggcttggaccgtgctgacagaatactacaaatccttggagaaagcttaggctgttaacccagtcactccacctttgacacattactagtaacaagaggggaccacatagtctctgttgacatttctttgtggtgtctgtctggacatgcttcctaaaaacagaccattttccttaacttgcatcagttttggtctgccttatgagttctgntttgaacaagtgtaacacactgatggtt

SEQ ID NO: 8899 - DNA, 595 bp, Homo sapiens
  misc_feature (1)...(595): n = g, a, c or t
cctcctcnaccaaggcagggaacttcaatctgtataagtatctgcagttgctggaataatttgaagaccccatggagctaaggagattaagtggaggattttcattgtttcagaggggcaaggggcaaatccattgctaattctttaatgatgaaaaatggtaagaagttgttaaactcctttggggattttaaaaagtgatacgtaaacagaagagagagagagagagagaaatcacagtagtgaggctaacaaaaataatgataaaaaggttagaagaacccaggatacttagtggatgcctagacaacataaaaatagatttatagaaggaagcaatggaatttgaatataaaagggtatcagaaagttaatgtgttgcatctgaaattcaaagtatttccttttggctacacaagaaagacttttaataaaaccctttgtatatatttctgaaaggtaaatattttatagggaaatggaggattggaagaaaatctgttccatcatgtctgggtattagaattttgcttaataacttgccaaaatattacgcttccaagggctatggcattatgtgtgtacccaattaaag

SEQ ID NO: 8900 - DNA, 606 bp, Homo sapiens
  misc_feature (1)...(606): n = g, a, c or t
ctgtcaccaggccagaaacaaaaagaagagcctaaggaagtgaagctcagtgttcccatgccctacacactcaaggtgcactacaagtacacggtagtcatgaagactcagcccgggctcccctacagccaggtccgggacatggtgtctaagaaactggagctccggctggaacacactaagctgagctatcggcctcgggacagcaatgagctggtgcccctttcagaagacagcatgaaggatgcctggggccaggtgaaaaactactgcctgactctgtggtgtgagaacacagtgggtgaccaaggctttccagatgaacccaaggaaagtgaaaaagctgatgctaataaccagacaacagaacctcagcttaagaaaggcagccaagtggaggcactcttcagttatgaggctacccaaccagaggacctggagtttcaggaaggggatataatcctggtgttatcaaaggtgaatgaagaatggctggaaggggagtgcaaagggaaangtgggcattttccccaaagtttttgttgaagactgcgcaactacagatttggaaagcactcggagagaagtctaggatgtttcacaaac

SEQ ID NO: 8901 - DNA, 95 bp, Homo sapiens
  misc_feature (1)...(95): n = g, a, c or t
ctggtttntaattctaatantataaaaattggaaatttgaaatagttctgtaaaagaaaaaaatgtaaaaatacatctgctttctctnatggttt

SEQ ID NO: 8902 - DNA, 448 bp, Homo sapiens
ctggagagtgtagatcccaaaattacccaaagaagaagatggaaaagcgatttgtcttcaacaagatagaaatcaataacaagctggaatttgagtctgcccagttccccaactggtacatcagcacctctcaagcagaaaacatgcccgtcttcctgggagggaccaaaggcggccaggatataactgacttcaccatgcaatttgtgtcttcctaaagagagctgtacccagagagtcctgtgctgaatgtggactcaatccctagggctggcagaaagggaacagaaaggtttttgagtacggctatagcctggactttcctgttgtctacaccaatgcccaactgcctgccttagggtagtgctaagaggatctcctgtccatcagccaggacagtcagctctctcctttcagggccaatccccagcccttttgttgagccagg

SEQ ID NO: 8903 - DNA, 603 bp, Homo sapiens
  misc_feature (1)...(603): n = g, a, c or t
cctttattgatttaattttcctttcaacttatcaatgctatcacaaattctaaggaaacaggacttgggcaaaattttttattatgaagatacagatctaagaacagaaggataattatgtgctagcttatatatagttccttgtaaaaataatgatacatgaaaaattagtagaaaatgaaaatctgcagttatctgatatctgaaaatgttaagcaatttcccctgcatcttagttctaatcacttttgcagaataatcaagcatatttgggtgaagagagtatttaatgattccatttttattaatagtgtagtgtgcccttcagagcttggcgtagtctttaagaatcatctgaagtttctggctcagcatgatgttccctctggccttcagcctgccactaaagaatgccttctgagggtcaagcttgcccaggaccacctccatgaaatcttcatctgaaagtatgattgntgtatcagcagcaccttttgcagggccttggtacacttttccagaaccacttttcaggtcaatagtccacttagccccaatatttccgcctttggttatatgccactcaaatacagcatttacacc

SEQ ID NO: 8904 - DNA, 324 bp, Homo sapiens
cctgtatagaacaacaatttgattctctcaatggaggagtatctgtgtcaaaaaatagtacttttgctgaggaatttgcacatagtattcggtcaatttttgcaaatgtagaagccaaacttggagaaccttctgaaattgaccagagagacaagtatgttggaatttgtggactctttgtattgcactttcagatttttcgaactattgataaaaagttttataagtctttattggacatttgtaagaaggtaccagccatcactctaactgctaatattatttggtttcctgataattttctgatccagaaaataccagcag

SEQ ID NO: 8905 - DNA, 200 bp, Homo sapiens
tgtgtctaggaaatagggcaggagtgggcgctgaggaggagtatgtcctcccagttaccttgagatctgccacagtgaggtttctatggcataccagagaatggaaagaagattaggttggcacttcctacttctgataccatcttcacggcttcattaggtgcccccaatttccacagaatctgaagttctgggcaagg

SEQ ID NO: 8906 - DNA, 564 bp, Homo sapiens
  misc_feature (1)...(564): n = g, a, c or t
ctgcttgcacaaatggatgttagtatgggaggaagagtggcagaggagcttatatttggaaccgaccatattacaacaggtgcttccagtgattttgataatgccactaaaatagcaaagcggatggttaccaaatttggaatgagtgaaaagcttggagttatgacctacagtgatacagggaaactaantccagaaacccaatctgccatcgaacaagaaataagaatccttctaagggactcatatgaacgagcaaaacatatcttgaaaactcatgcaaaggagcataagaatctcgcagaagctttactgacctatgagactttggatgccaaagagattcaaattgttcttgaggggaaaaagttggaagtgagatgataactctcttgatatggatgcttgctggttttattgcaagaatataagtagcattgcagtagtctacttttacaacgctttcccctcattcttgatgtggtgtaattgaagggtgtgaaatgctttgtcaatcatttgtcacatttatccagtttgggttattctcattatgacacctat

SEQ ID NO: 8907 - DNA, 593 bp, Homo sapiens
caggagggttgtctggagccaccaggttgcaatttgaggcagcagtagtgagggaaatggtatgagaagatttgtagatgttatgaggcagcatcttttgtgacatattttctcattttaggttttgaaaatagtgaagtactccctgaaaacacacaccaaataatgaactataaaaatacttggattatgaatatattttagtggcttctcttttctttttattataatgtatttttttctcatgcatactccatatcttgcttgtgttcaagcatactttaatttttaattcatcagttaagctgtctttgagttaccatgatattgggcatacctcattattttttacaccaaatgcattttaaaaaggaaaaaggacactgttttatcttctttcttgctgctttaatgaggatggagggataagttacaggctggcacattaaatgtactactatggaaggacctttttctttatcagtgtcccttccctacccttaaaatcactgatcagggtctagcagtatctgctcctcaaaacttgggaccaagtgatggtgttcccacttgcaatgtcctctcatagcact

SEQ ID NO: 8908 - DNA, 381 bp, Homo sapiens
ctcagtgttcatcagtgaagcgttctgggcacggccatgcccggctttcacatgttgtctgtgctgttctcactccagtgggagagcggagtagtcgccacagagagcacctggcccgcacagcctgttctgcattttacagaagtttcccaactcttgctttgttacatgcaaagtctagaaaggataaatgcaaaatattagcaggtgatgttgtgaagtttcctttttcttttcttttttttttttcctccttgatagagtgtcactctgtcacccaggctggagtgccgggcgtggtagttgacgcctgtaatcccagcagtttgggaggccgaggaggatggatcacctgaggtcagaagttcgaaaccagcctgg

SEQ ID NO: 8909 - DNA, 603 bp, Homo sapiens
ctggaggtgtaatagtgcgggtagtgggtttggagaagttccgaggcggcggtggcgccggtcaggacaaggatagcggaaccgggccctgggcttgtcgctcaccatgccgacagtagaggagctttaccgcaattatggcatcctggccgatgccacggagcaagtgggccagcataaagatgcctatcaagtgatattggatggtgtgaaaggtggtactaaggaaaagcgattagcagctcaatttattccgaaattctttaagcattttccagaattggctgattctgctatcaatgcacagttagacctctgtgaggatgaagatgtatctattcgacgtcaagcaattaaagaactgcctcaatttgccactggagaaaatcttcctcgagtggcagatatactaacgcaacttttgcagacagatgactctgcagaatttaacctagtgaacaatgccctattaagtatatttaaaatggatgcaaaagggactttaggtgggttgttcagccaaatacttcaaggagaggacattgttagagaacgagcaattaaattcctttctacaaaacttaagactttaccagatgaagt

SEQ ID NO: 8910 - DNA, 549 bp, Homo sapiens
cactaaagcatagtacgtggatgtcagtgagacagcatgagagccagcagtcatcaaagcgttccacgtttgaagttagcaactgcttaaagttatgccctattaaaattgctttctcaaaagtttgggttagtttcaaatgtgatattttggagggaaggtaaagtaggtatctttcaggtcgtgataatgagctcctatgaaaggatgcaatataatgacccgcttttctagaaagttcataatcagctctggaacaagcacacttgattcctcactgtgcttcagaatgagattaagatcagatgttggaacgtgctatgctgtagcgtgtctggaaacaaagtacacaaacctggctacggtgatgagttagcttctgcttactacctgtgacaacccaagtgggtgacactagtgaaccttctccagtctgcaggctggcatagaaggctcttagattatattgggcagcttgcaatctgccgaagcagtgacttgcatttccacacttggcttgagcactcaacccagaaggcgaagatagct

SEQ ID NO: 8911 - DNA, 437 bp, Homo sapiens
ccttaattttctgttcatggactgttaaaagtaaaaccaaactttcaaaagggataaacctaaatatttacttgttatcattagagagggaacatcaaatgctgggacatcattactaaccaatagcatcagacactggatttaatggataatcacaatggtcgtaatgtatacagacatatataccacgttctagtataaatttttcaaaaaatacaataataatataatttataaagaacactcttctatgaacaaccaccaccaccaaaaaagaaaaagccctcagaaaatttctcacaaataaggcaactaatgcctgatatctcaaaatcctttacaaaaggagatagttctagtcaaggagttttgggtatgttacttttttttcttctttttcttttcatctgcctccatcttaagtgcaatttcttcag

SEQ ID NO: 8912 - DNA, 595 bp, Homo sapiens
  misc_feature (1)...(595): n = g, a, c or t
cctacttcacaaagcgccttcccccgtaaatgatatcatctcaacttagtattatacccacatccacccaagaacagggtttanaaaaaaaaaaaaaaaaaaaaaaaaaaagcttgtacaaaaaatgggngcgctgcantccagacagnaatttntgcaaactgncttgnanaaaaaggaccaatgttcgaactacttccaggtgaatccaacaagatcccccgtctgaggactgacctttttccaaagacgagaatccaggacttgaatcgtatcttcccactttctgaggactactctggatcaggcttcggctccggctccggctctggatcaggatctgggagtggcttcctaacggaaatggaacaggattaccaactagtagacgaaagtgatgctttccatgacaaccttaggtctcttgacaggaatctgccctcagacagccaggacttgggtcaacatggattagaagaggattttatgttataaaagaggattttcccaccttgacaccaggcaatgtagttagcatattttatgtaccatggttatatgattaatcttgggacaaagaattttatagaaattt

SEQ ID NO: 8913 - DNA, 597 bp, Homo sapiens
ccaaaagaagtaagacagcttgctgaagatttcctgaaagactatattcatataaacattggtgcacttgaactgagtgcaaaccacaacattcttcagattgtggatgtgtgtcatgacgtagaaaaggatgaaaaacttattcgtctaatggaagagatcatgagtgagaaggagaataaaaccattgtttttgtggaaaccaaaagaagatgtgatgagcttaccagaaaaatgaggagagatgggtggcctgccatgggtatccatggtgacaagagtcaacaagagcgtgactgggttctaaatgaattcaaacatggaaaagctcctattctgattgctacagatgtggcctccagagggctagatgtggaagatgtgaaatttgtcatcaattatgactaccctaactcctcagaggattatattcatcgaattggaagaactgctcgcagtaccaaaacaggcacagcatacactttctttacacctaataacataaagcaagtgagcgaccttatctctgtgcttcgtgaagctaatcaagcaattaatcccaagttgcttcagttggtcgaagacagaggtgcaggt

SEQ ID NO: 8914 - DNA, 576 bp, Homo sapiens; identical to SEQ ID NO: 8798

SEQ ID NO: 8915 - DNA, 435 bp, Homo sapiens
ctggagcccttccctgagaaactcttacaggccaggaagccagtacagatctttgagaggtctgtgtacagtgacaggctccactttgaggctctgatgaacattccagtgctggtgttggatgtcaatgatgatttttctgaggaagtaaccaaacaagaagacctcatgagagaggtaaacacctttgtaaagaatctgtaaccaataccatgaagttcaggctgtgatctgggctccctgactttctgaagctagaaaaatgttgtgtctcccaaccacctttccatccccagcccctctcatccctggagcactctgccgctcaagagctggtttgttaattattgttagactttgccattgttttcttttgtacctgaagcattttgaaaataaagtttacttaagttatgcttgtttttctaaaaaaaa

SEQ ID NO: 8916 - DNA, 450 bp, Homo sapiens
  misc_feature (1)...(450): n = g, a, c or t
gctgcctgtatctttcatttttaaaatagcacttgagttattttctgagtaatccaataaagaacttttgatgacagccagaatgtgttagaactctggctgaacatttcatctcctgtgagtcagaagggctttatttctccctttgatggggccccttcttctttctggtgctctggaagttgtttagaggaaagaattctaattttaattaattgcgcagtgagttaatctcactcgcttttctgcttccaggcatcttaggaaaaacaaatggttttagtagataagggatgcctactaatgcttttttaaaacaaacagggacatttttattatagatttgatttttttaatgaatgtttttaaaaatatataaataggacaccaaagcggcagggttttttttggggggagggggtttgttttccaactcangatggcacatta

SEQ ID NO: 8917 - DNA, 605 bp, Homo sapiens
  misc_feature (1)...(605): n = g, a, c or t
ccttggtcctagcacccactcgagaattggctcagcagatacagaaggtggtcatggcactaggagactacatgggcgcctcctgtcacgcctgtatcgggggcaccaacgtgcgtgctgaggtgcagaaactgcagatggaagctccccacatcatcgtgggtacccctggccgtgtgtttgatatgcttaaccggagatacctgtcccccaaatacatcaagatgtttgtactggatgaagctgacgaaatgttaagccgtggattcaaggaccagatctatgacatattccaaaagctcaacagcaacacccaggtagttttgctgtcagccacaatgccttctgatgtgcttgaggtgaccaagaagttcatgagggaccccattcggattcttgtcaagaaggaagagttgaccctggagggtatccgccagttctacatcaacgtggaacgagaggagtggaagctggacacactatgtgacttgtatgaaaccctgaccatcacccaggcagtcatcttcatcaacacccggaggaaggtggactggctcaccgagaagatgcatgctcgagatttcactgnatccgccatgcatgga

SEQ ID NO: 8918 - DNA, 597 bp, Homo sapiens
  misc_feature (1)...(597): n = g, a, c or t
ccaacattgcgaaaccctgtctctactaaaaaaaaaaaataaaaaatacaaaaattagctgggtatgatggcacatgcctctaatcccagctactgggaggctgaggcatgagaatcgcttaaacctgggaggcgggtttgcagtgagccaagatagcaccactgcactccagcctgggtaacagattgagactctgtcaaaaaaaaaaaaagatgttaaaggaaaaatctgaggcgcaattcatgaagtttagtgttccagtggcaaaatgtcacaggcaagtatttattgggaaaatgtggaagcaaaataaaggcaatcggttggttttcaattacataattgttttttgggggtaggtatcttcttanaaagtccctagtcacctaattatatgttagtaggctgcttgtgattggctggggttgtcttatttctaacataagcatttaccanaaatgatccaagttaagttttgcttatgcttgtatgtagtatgaccccgtgaagttttgcttgngtttgtagtttaagcaaagttaaagctatttctaagggccaggtggttttgtttgctcaggatttttccagtctcc

SEQ ID NO: 8919 - DNA, 570 bp, Homo sapiens
  misc_feature (1)...(570): n = g, a, c or t
gctagactaagttggtcatgatgcanaagctactcaaatgcagtcggcttgtcctggctcttgccctcatcctggttctggaatcctcagttnaaggntatcctacgcagagagccaggtaccaatgggtgcgctgcaatccanacagtaattctgcaaactgccttgaagaaaaaggaccaatgttcgaactacttccaggtgaatccaacaagatcccccgtctgaggactgacctttttccaaagacgagaatccaggacttgaatcgtatcttcccactttctgaggactactctggatcaggcttcggctccggctccggctctggatcaggatctgggagtggcttcctaacggaaatggaacaggattaccaactnntanacgaaagtgatgctttccatgacaaccttaggtctcttgacaggaatctgccctcagacagccaggacttgggtcaacatggattagaagaggattttatgttataaaagaggattttcccaccttgacaccaggcaatgtanttagcatattttatgtaccatgggtatatgattaatcttg

SEQ ID NO: 8920 - DNA, 225 bp, Homo sapiens
cctttcctctgcaggttggagaacacagcgcgcgaccatgaacgcttccttttgtacgtctgcggcatggtgtccttcgtgagcacagcatagggacctggaaacgtgtcttggaactgatgctgaactgaatttcttgggttcgagtttaagggactctggattgcagaagcctcgttaatgggatctagagatgcgaagaactggccggccgagggctgcagg

SEQ ID NO: 8921 - DNA, 600 bp, Homo sapiens
  misc_feature (1)...(600): n = g, a, c or t
canagagccaggtaccaatgggtgcgctgcaatccagacagtnattctgcaaactgccttgaagaaaaaggaccaantgttcgaactacttccaggtgaatncaacaagatcccccgtctgaggactgacctttttccaaagacgagaatccaggacttgaatcgtatcttcccactttctgaggactactctggatcaggcttcggctccggctccggcntctggatcaggatctgggagtggcttcctaacggaaatggaacaggattaccaactagtagacgaaagtgatgctttccatgacaaccttaggtntcttgacaggaatctgccctcagacagccaggacttgggtcaacatggattagaagaggattttatgttataaaagaggattttcccaccttgacaccaggcnatgtagttagcatattttatgtaccatggttatatgattaatcttgggacaaagaattttatagaaatttttaaacatctgaaaaagaagcttaagttttatcatccttttttttctcatgaattcttaaaggattatgctttaatgctgntatctatcttattggtcttgaaaatacctg

SEQ ID NO: 8922 - DNA, 501 bp, Homo sapiens
ccattgctagttggacgtcggaaggaaaaaaatgttcaaggtataattgaaatcctcaaaggaatgcaagaattgggagtacatcctgatcaggaaacatatacagattatgtgattccatgctttgatagtgtaaactcagcacgagccattttgcaggaaaatggatgtctgtctgatagtgatatgttttctcaagctggattgagaagtgaagcagcaaatgggaacttagactttgtattatcatttttgaaatcaaatacattgcccatctcgctgcagtctataagaagtagcctactgctaggcttcaggaggtctatgaatataaatctttggagcgagataacagaattgttgtacaaggatggacgttattgccaggagcctcgaggaccgacggaagctgttggctattttctttataacttgattgacagcatgagtgactcagaggtacaggccaaggaggagcatttgagacaatacttccatcag

SEQ ID NO: 8923 - DNA, 604 bp, Homo sapiens
  misc_feature (1)...(604): n = g, a, c or t
ctggcaatgacaagactgggagtatcaaactaggattgttagttcaattaaaatttcagataaacaataatgtacttatactaaaaaattatttgttgtttatctgaaatgaaaatttaactgggtacccaattgtttgtttgtttaatctaaaaaccctgattgaaatttatctaataaaacatcatttaatatctaaaataaaataaatttactataacatctttataactattcaatcaatgattcatcttctatttttccaaattcttgcacaaatatttgatgcttaaataaatacataaataataaataggttaataagttacacttgaaaataatttatgttatgatgaaaaaacttaaagtgcttccacatgtcctcacaacatcactgtgaggtaagatggtggctaatactttttccacttagaaataaaggagaaaccaaggcacagtggaacaaggacttgtggatcctggctagcagactagggttgccagatttaacagaaaaaaatccaggatttccagctaaatttgactttatggcaaaatttattgncccatcatttttatgtgatgcttcaaatatcacattcta

SEQ ID NO: 8924 - DNA, 577 bp, Homo sapiens
ccaagggcagtttgctggatttcctgaagagcaatgaaggtggcaaagtgctgcttccaaagctcattgacttttctgctcagattgcagagggaatggcatacatcgagcggaagaactacattcaccgggacctgcgagcagctaatgttctggtctccgagtcactcatgtgcaaaattgcagattttggccttgctagagtaattgaagataatgagtacacagcaagggaaggtgctaagttccctattaagtggacggctccagaagcaatcaactttggatgtttcactattaagtctgatgtgtggtcctttggaatcctcctatacgaaattgtcacctatgggaaaattccctacccagggagaactaatgccgacgtgatgaccgccctgtcccagggctacaggatgccccgtgtggagaactgcccagatgagctctatgacattatgaaaatgtgctggaaagaaaaggcagaagagagaccaacgtttgactacttacagagcgtcctggatgatttctacacagccacggaagggcaataccagcagcagccttagagcac

SEQ ID NO: 8925 - DNA, 467 bp, Homo sapiens
  misc_feature (1)...(467): n = g, a, c or t
ccactagctgaatcttgacatggaaggttttagctaatgccaagtggagatgcanaaaatgctaagttgacttangggctgtgcacaggaactaaaaggcangaaagtactaaatattgctganagcatccaccccaggaaggactttaccttccaggagctccaaactggcaccacccccagtgctcacatggctgactttatcctccgtgttccatttggcacagcaagtggcagtgtctccaccacctatgatggtgatgcagcccctagaagtggctttcaccacctcatccatgagagctttggttccccgggcaaaagcttcccattcaaatacccccacaggaccattccacacaatctgcttagcccgagtgacagcctcagcatacttcttgctgctttcaggaccacagtccaagcccatccagccagcaggtatgccagaagccacagtggcttgg

SEQ ID NO: 8926 - DNA, 478 bp, Homo sapiens
ctgaaccctcgtggagccattcatacaggtccctaattaaggaacaagtgattatgctacctttgcacggttagggtaccgcggccgttaaacatgtgtcactgggcaggcggtgcctctaatactggtgatgctagaggtgatgtttttggtaaacaggcggggtaagatttgccgagttccttttactttttttaacctttccttatgagcatgcctgtgttgggttgacagtgagggtaataatgacttgttggttgattgtagatattgggctgttaattgtcagttcagtgttttaatctgacgcaggcttatgcggaggagaatgttttcatgttacttatactaacattagttcttctatagggtgatagattggtccaattgggtgtgaggagttcagttatatgtttgggattttttaggtagtgggtgttgagcttgaacgctttcttaattggtggctgcttttagg

SEQ ID NO: 8927 - DNA, 605 bp, Homo sapiens
ctgggaagccacgagaatattgtgaacctgctgggggcgtgcacactgtcaggaccaatttacttgatttttgaatactgttgctatggtgatcttctcaactatctaagaagtaaaagagaaaaatttcacaggacttggacagagattttcaaggaacacaatttcagtttttaccccactttccaatcacatccaaattccagcatgcctggttcaagagaagttcagatacacccggactcggatcaaatctcagggcttcatgggaattcatttcactctgaagatgaaattgaatatgaaaaccaaaaaaggctggaagaagaggaggacttgaatgtgcttacatttgaagatcttctttgctttgcatatcaagttgccaaaggaatggaatttctggaatttaagtcgtgtgttcacagagacctggccgccaggaacgtgcttgtcacccacgggaaagtggtgaagatatgtgactttggattggctcgagatatcatgagtgattccaactatgttgtcaggggcaatgcccgtctgcctgtaaaatggatggcccccgaaagcctgtttgaaggcatctacaccattaagag

SEQ ID NO: 8928 - DNA, 605 bp, Homo sapiens
ctggtggaagctctctgaagaactgagacaggaggtggcactgctctgacaccatcctttgaaggtgacagagcatctcagggcttgggggacgccagccggactttgagaggagacagaagaggtgcttgcagaggtatttcacaaagatcagggtctcggcccaaaagttgacttctgctttttcaaacaggtagtcttcttccacctgatgcatgctctccacacaggccacgaggtcatcactctctcccaacagccatcccagcaggatgggcagtccaggggccaactggtcccactgctggagcagatcacacaggacggccagggccagggccagagcgatggaggcatccacctggcagaaggcaaactctgttgactggcaggtattttcttgtgacatggcagttgtcacggtttccgtggctgcatctctaacagcttgctcctcactctgcagaagggtaaggacacacttccagagagcaagtgtatcctgcaactcaagaataggatgggggttggtgaggaaaagtggtgtagtactggtgaggacttcaacgacggccagcctagactctgtaggaagatggtcttca

SEQ ID NO: 8929 - DNA, 598 bp, Homo sapiens
ctgctgaaccctttagggcatttcctctgtaatgtggcgctttcaactgtactgctgcagctttaagtaccttaaagcttctcctgtgaacttcttagggaaatgttaggttcagaactaaagtgttttgggtgggttttgttgcgggggggagggtaacaatgggtggtcttctgatttttatttttgaggttttgtcaactggagtacgtagaggaactttatttacagtactttgatttggcaggttttcttctacttgtgctctgcctggagctgtttccatatgatataaaaagcaagtgtagtattccattactatgtggcttagggatttatttgttttttaaaatcaaccatgttagctgggattagactccctacagtccttcaatggaaaagtaacatttaaaaatcctttgggtaattcaaattacagatttaaaagagcttaagatctggtgttttgttaatgcttctgtttattccagaagcattaaggtaacccattgccaagtatcattcttgcaaattattcttttatataactgaccagtgcttaataaaacaagcaggtacttacaaataattactggca

SEQ ID NO: 8930 - DNA, 597 bp, Homo sapiens
ctgaatttcacttttctttaaaaatttaatattaaaatgttttcatctcttaattgttggcttgcttgcatggatcattcattaaataattttttatttgctagatacccataatatctgccgaacatctgactagccacaagtatgttacccagatgtagaattttcatcactaaacagtaagttcattatgtaatatatagttgcatatttgtggtggttttttttaagatagcaattgtatagtgcacttaaaattttgcgaaatctctgagaaaatatatacagatcacatttttatcttaaatgggtgtgaggaattttatcagacatctttataacaaatatgttaatatcacttaaatatacaaagtactaagagaaaataaattttttaaatttctgattagagataaacacagcataaagaaaatgtatgaccaaaaagtaattagaaggtatagatcaagggttggcaaactttcttatagggtcagacagtaagtatttttgctgtgtgggccgtatcgtttctgttgcagctactctcctctgccattgtatcatgaaagcagccagagaccacatgtaaacaaa

SEQ ID NO: 8931 - DNA, 576 bp, Homo sapiens; identical to SEQ ID NO: 8798

SEQ ID NO: 8932 - DNA, 305 bp, Homo sapiens
ccttgctcggagtcccaggagatccacaggtccggcatgaacagtgagaggtcagaggtggaaggctcagcaggagaggagaggaggatcagcagaggtcatgagaaggccagaatccagggtcaggctgtcctggtcgaagttgagtttcttagctggaggagtttctcctagcccttcaatatccaccacgtcactgttggcatcggagtcgttcagagcactgagtgtcacatcagccttctgtttctttatggggggacccccggcctcagggacactggagctgctgggaggaggggcag

SEQ ID NO: 8933 - DNA, 401 bp, Homo sapiens
ccgcgccggtgagtagcactctctgagagctccaatttcatccgtctgccatcggcgccatcctgcaatctaagccacaatggtgcgcatgaatgtcctggcagatgctctcaagagtatcaacaatgccgaaaagagaggcaaacgccaggtgcttattaggccgtgctccaaagtcatcgtccggtttctcactgtgatgatgaagcatggttacattggcgaatttgaaatcattgatgaccacagagctgggaaaattgttgtgaacctcacaggcaggctaaacaagtgtggggtgatcagccccagatttgacgtgcaactcaaagacctggaaaaatggcagaataatctgcttccatcccgccagtttggtttcattgtactgacaacctcag

SEQ ID NO: 8934 - DNA, 593 bp, Homo sapiens
aaggctaccatgccggatctgtaaatgaacctgttaaatgctgtatttgctccaacggcttactatagaatgttacttaatacaatatcatacttattacaatttttactataggagtgtaataggtaaaattaatctctattttagtgggcccatgtttagtctttcaccatcctttaaactgctgtgaatttttttgtcatgacttgaaagcaaggatagagaaacactttagagatatgtggggtttttttaccattccagagcttgtgagcataatcatatttgctttatatttatagtcatgaactcctaagttggcagctacaaccaagaaccaaaaaatggtgcgttctgcttcttgtaattcatctctgctaataaattataagaagcaaggaaaattagggaaaatattttatttggatggtttctataaacaagggactataattcttgtacattatttttcatctttgctgtttctttgagcagtctaatgtgccacacaattatctaaggtatttgttttctataagaattgttttaaaagtattcttgttaccagagtagttgtattatatttcaaaacg

SEQ ID NO: 8935 - DNA, 579 bp, Homo sapiens
  misc_feature (1)...(579): n = g, a, c or t
ccaacatggtgaaaccccatgtttactaaaaatacaaaaattagccaggcatggtggtgcatgcctgtaatcccagctactggggatctgaggcaggaggatcgcttgaacccaggaggcagaggttgcagtgagctgagatcatgccactgaactccagcctgggcaacagagagactccgtctcaaaaaaaaaaaaaaaaaattcatcaaggtatatacatatacattcagattagtgtacatgtaaaatatgatatacaacagagcctttcatgaataggataatttgcatattcatatggaaaacatatgcagtatcttaagccatagttttccaaaatttcaaattaaatacttatagctttgacatattcctgttacttcaactttccagggatgctctagaagaaacgggagacatgttgtaagactttaatgacattccacaaactaaatttattgngggaattaacatcagaaattaagggaaaaaatactctaatttgatcactagctgctacatggtccactttctagggagtcttgnatatttttttcacaattctgtttgctaagt

SEQ ID NO: 8936 - DNA, 487 bp, Homo sapiens
ccacaggtcctgcctagacacacatcaatatgaaacaaaaaaaatttatataaataagtcaattaaacttcacaaaaactaaagaaacacaagacaaaaatccaacaagcaataaaaactgtacaatattggtcagtcttttatatctgaaaaatgtgtaacttaaaaaaaagttatttatcgtataaaaaaaagtcttttacatctgtgttagctggagtgaaaacttgaagactcagactcagtggaaacagatgaatgtccacctcgctttcctttggagaggatcttgaggctggaccctctgctcacagaggtgagtgcgtgctgggcagaggttttaaatttggctccaaggaaagcatagaggatggggttcagacaacagtggaagaaagctagggcctcggtgatggaaatccacttgtgcacagtgttctcaaactcacacccttgcttgatgatttccaggaggatgaaggagtcg

SEQ ID NO: 8937 - DNA, 608 bp, Homo sapiens
ccacgaagcaccgccaggacagttttcaaggaagagaaagtaaagggtctccaaagaagcggctggatgtccgtctgtcgagaacgtccagcgtggagcggggcaaggagagggaggaggcttggagctttgacggggcattggagaacaagcgaactgccgctaaggaatctgaggagaacaaggagaacctgatcataaattctgaactcaaagacgacttgcttttgtatcaggacgaggaggcgctgaacgactccattatttctggaacactgccacggaaatgcaagaaggagctcctggccgtgaagctaaggaaccggccaagcaaacaggaactagaagaccggaacattttccccagaaggactgatgaagaaagacaggagatccggcagcagatcgagatgaagctttccaaacggctgagccaaagacctgccgtggaagagctggagagaagaaatatcttgaaacaaaggaatgatcagacagagcaggaagaaagaagagaaatcaagcaaagattgacaagaaagcttaatcagagacccactgttgatgaattaagagacagaaaaattctgatacgattcagtgattac

SEQ ID NO: 8938 - DNA, 383 bp, Homo sapiens
ccaggcattaaacttagtaacattaagtacactttagtactacagcagtcaaagagatctccactagagatcagaaagaagcaccactattttcttctatgacgtgtatgtgttggtcatgagcatgctagtatgaataaggcaatgtgttaagcactggcatacaaatgcagctaaaggtgctgaaggaaggcagtggggtggtgcaggcacacagcagggagctcttccccgtgacacgttagtcatcttctccacagagcaacagaagagctttcttatagtccccagatgtatctcccttaatcatggaataaagagaggtggcaaaattcttcctaaactccttcctgatgttaaacagatcaatctcactcctggaa

SEQ ID NO: 8939 - DNA, 604 bp, Homo sapiens
  misc_feature (1)...(604): n = g, a, c or t
ccacagaacagtccctttttgagtaaagcagcaaggttgcttaatgacatgctatgtggttaacaagattcaactgccacatcaaggactttaaataatttcaagattttaaatgtatttatgaaatgaactcattacagcagctaatcaatgcaaactttgtcctttttctttgtctttctaagagaaactgaatttaatttaaatttaaattacagtgtctaaaacttggtaaaatattttaaatttgaataagaggaaaaaaaaaacatgaatttatttatgatggagcttcatacccaggacagtagcttcttaaatgttagtaaaataattatgttaagcattaaaacaattttgaatatgtaattaagcatttatgttaaaaaacatgtttcttacgtgtgtgtgtatatatttataactgacacatgtgattctttgtacagtatttagaatccttcccttcagatagcagtcctcttgtattcagtcttgnggctaaaatagatcaaaaacatattttaaaactgttaaagtaactgtatgactcatgcttgaagttctgaaatttgggagcgttatgaggtttccatgccattaa

SEQ ID NO: 8940 - DNA, 279 bp, Homo sapiens
ccaccaccacgtcgatgcggtccactgagaaggggttgaactgcttgtccggccggcgcatgaactcatgcttgaggaggtagccgctctgcccgttgaactcaaatactgccatgttctgctgcatgggcaagtccatcgtctggaagttgagggcaaccatctggcatccagcattccagaacatctggggcatgtagttggaggagtccatgcgggttcccttggggtaaatgcggctcatctggcgcttgttgtagtccacaaactgcaccgagg

SEQ ID NO: 8941 - DNA, 234 bp, Homo sapiens
ccatttaagtttagtagtaaaagactggttaatgataacaatgcatcgtaaaaccttcagaaggaaaggagaatgttttgtggaccactttggttttcttttttgcgtgtggcagttttaagttattagtttttaaaatcagtactttttaatggaaacaacttgaccaaaaatttgtcacagaattttgagacccattaaaaaagttaaatgagaaaaaaaaaaaaaaaaaaa

SEQ ID NO: 8942 - DNA, 438 bp, Homo sapiens
ctgggaaaatgaagggaatcatggtcaaatccttggagggacagaaggaaggcaatgggagaaaccagccagcctgggttttcaataccaactcacatgcaaggtaacccaagcctcatcctctgatctgtaaattggggcaaatgtgaattatttcccttgttgaaaaatatttaaaagatgagggtaggtggaacgtgaacatatgtgtgttttaaacttactgtagcttattgataggaattacagttctggcaaatttcccaaaacctgtagtaataccgtaaacaactaggataaaaagagacattatgcaattaaatgcagggatttttgtttgtttataaaaatatttataacataaagataaaaagatacctgttttctcttttatgatgctatctatgacctccctggatttctgcaccctcttctcag

SEQ ID NO: 8943 - DNA, 573 bp, Homo sapiens
  misc_feature (1)...(573): n = g, a, c or t
ccaggctggtcttgaactcctgaccccaggtgatccactcgcctcggcctcccaagtgctgggattacagacgtgagccaccacgcctggctcactttattttattgatgaagagccccaaacactgggtgggaaggggacttaaggccactcagctcatcggtgggagagacgggacaccttttccatcccacgatgcctcatagaaccgggagagagtggaggacgctaagtgtagaaaactctgttaaggagcttggtgctcgggtgagaatggaggcagcagagcactttgggaaggggcaagagaaagaggacagttctagaaagacagttctttcaagatagcccgttggagatgcctggcaggaaatgggcactcaaggctggagatgcatctttagatgtggagtcttaggattaggtggaagcagaagacctgagcatgtctgggctttcacacgaaggatgagaagagacgaggatggaattccagggcacaccaaccatgaatgggcnngncaaaggaaaaaccgccagcaaaggagaccaagaaggtgataaaacagactt

SEQ ID NO: 8944 - DNA, 591 bp, Homo sapiens
  misc_feature (1)...(591): n = g, a, c or t
ccaaagaccaaattccttggcatgccttccagcaccctgcaaaatgagaccctcgtggccttccccagcctcttctagagccgtgatgcctccctgttgaagctctggtgacaccagcctttctcccaggccaggctccttcctgtcttcctgcattcacccagacagctccctctgcctgaaccttccatctcgccacccctccttccttgaccagcagatcccagctcacgtcacacttggttgggtcctcacatctttcacacttccaccagcctgcactactccctcaaagcacacgtcatgtttcttcatccggcagcctggatgttttttccctgtttaatgattgacgtacttagcagctatctctcagtgaactgtgagggtaaaggctatacttgtcttgttcaccttgggatgatgcctcatgatatgtcagggcgtgggacatctagtaggtgcttgacataatttcactgaattaatgacagagccagtgggaagatacagaaaaagaggggctgggctgggcgcggtggttcacgcctgtaatcccagcactttgggaggccaaggagggnggatcac

SEQ ID NO: 8945 - DNA, 266 bp, Homo sapiens
  misc_feature (1)...(266): n = g, a, c or t
tgattgtagctatgttggtgtatctcgtgtncaagatggaaaagtgcttttgttgttctacctgatccagttgggggagcaggaatagggggtgcctgcctaacggcctctagcccatgtgcttatactgggatctgncccgagggatctgcacctggttggcagtcattttgtggtggacgtggtaaatcgcgagtgttaccatgatgacgaggcccannatgagccccaaaatcaggggcanggtttcttccanttgctcccgc

SEQ ID NO: 8946 - DNA, 460 bp, Homo sapiens
  misc_feature (1)...(460): n = g, a, c or t
agaaaggaataagctattaatacatgccacaacctagatgaatctcaaaataattatgctgaatgaaaaaagcagaagaaatatttgaagtaataatgactcagagtttcccccaaatgaacgtnagataacaaaccacagatccaggagaacactaacaggaaaaatatcccccaaaatatatcaaggcatatcatatttaaattgcagaaaatcaaagataaatacaactctgaaagtagccagaggaaaaaactttacccacacaggggctaagataataattatgtctgactacgcctcaggagccatgaaagcaagaaaagagtccggagaaatatttaaagcattgacagaaaaaaaaataccaccaacctagaattctggtaccctgggaattgcctcaaaagtaaagaataaatactttctcagacaaacaaaaattgagagaatttgtcag

SEQ ID NO: 8947 - DNA, 572 bp, Homo sapiens
  misc_feature (1)...(572): n = g, a, c or t
ctggtcaagaggctcacatctgcagaggtgccaatggccacagacaggctgctctctgagggttctgttggnggagaatctgaaggctgcagatcctttctagatggaagcttagaggatgcttttaatgggcttttacttgcattagaaccacataaagagcagtataaagagtttcaggatctgaaccaagaagtcatgaatttggatgatattctaaaagatgctaaacaccttgacgatcagaaactaantggtgctgcctcttggacggagatcactgagggtgaatganacaactgtgatttaaaagaccgaaagacgttttcccatgtgcttttgtgccatcttgagtgtcagagacagatccctgcaaggcccttcctaccttgcgctaagaaatcagcaaggagtgtcacctaactggatggaggacatttagtgcttctaacttgcagaatttgtcccattcgacccaccccagcatcctcttgaatatttggaaatacttctctccaactctgtgcccatagcaactggcattgttttgcttgtaatgtttctgcatgtgg

SEQ ID NO: 8948 - DNA, 381 bp, Homo sapiens
  misc_feature (1)...(381): n = g, a, c or t
ctggatctncaatgcagncgattgttcctccaaaggccaagtaccatgctcattgagggtaggttttgtagctccttctgacactttacatgaagtgccttgtcagcacatntgtagccttgaccacagcttaaatgtttgnatactcctttttattagggcagcttcattttgtttacacactgttttcatttctccagggaacaatttcaaaatgatcttccagatgctatataactaanaacttttaaactactgacctcaaaggtcancctgtttactggcatctgactgtgtagaacaggaagtttgtgntgcatcttgtgttcttaatgaaatccgacaacagaggactgaacgcattantctcagaacaggagg

SEQ ID NO: 8949 - DNA, 564 bp, Homo sapiens
cctctcagaaaactgagcatactagcaagacagctcttcttgaaaaaaaaaatatgtatacacaaatatatacgtatatctatatatacgtatgtatatacacacatgtatattcttccttgattgtgtagctgtccaaaataataacatatatagagggagctgtattcctttatacaaatctgatggctcctgcagcactttttccttctgaaaatatttacattttgctaacctagtttgttactttaaaaatcagttttgatgaaaggagggaaaagcagatggacttgaaaaagatccaagctcctattagaaaaggtatgaaaatctttatagtaaaattttttataaactaaagttgtaccttttaatatgtagtaaactctcatttatttggggttcgctcttggatctcatccatccattgtgttctctttaatgctgcctgccttttgaggcattcactgccctagacaatgccaccagagatagtgggggaaatgccagatgaaaccaactcttgctctcactagttgtcagcttctctggataagtgaccac

SEQ ID NO: 8950 - DNA, 608 bp, Homo sapiens
  misc_feature (1)...(608): n = g, a, c or t
ccaaacatacattaagtttaatttcaatgacagntncaatttncaatttacttttagatggttagttaactcttttcctactaaatgaaaatattcaatatgccacatatgaaaaaaataaaattctcccacccacaaaaaatcctccaggggcacaaaaaaaatcatttgttccctcatttttaaatatttctgcatgatgagacaatataaaggcacaatataggttaaaataaatcactctgtggtttctcaaaaaaagtgaaaacagatccaccatatgatccagcaatcccacttctgggaatacatccaaaagaaaggaaataagtaccttgaagagatatctgtactcccctgtttattgcagcactattcacaatagccaagatatggaagcaataatatttcttcttgaggaataaaatttttaaatgtggtatttatatacaatggaatattattcagccatgaaaaagaataaaactctatcatttgcagcaacatggatggaactggaggatattatgttaagcaaaataagccaggcacagaaagacaaatatcacatatcctctgtcatatgtgggagctaaaaaagttgatct

SEQ ID NO: 8951 - DNA, 479 bp, Homo sapiens
ctgggaacatttcccagtgcaactcacatttttcactgctctgtgcctgtctgtataagctcaatgagtattgatttaggggctttggagaactttgaatgctaccccccaagtaaccattattggcaacctggtacctctacttttagccatttctccttctctataaacagtgcagaagtaacccacttggtaacaggcatccttgccaagcctccaccactaggtcagtgtaagaattaaagaaagaggaaagaaacacgaaaagtggcttgatggttaagacaggtttattttagagaaaacacacctgagaggggctgctggctgaattaggttagagtcttttctacagactaagagtgtttaaggatttagggtgggagagtttcttagaggcttggactgcttctgtgtttttttgttgtgcttatatgggagggagagtggtgtgtttgcttttatacatttttctgcag

SEQ ID NO: 8952 - DNA, 608 bp, Homo sapiens
ctgtggctgtctgtcagagaagcacatttttctgcagataattagaatggcttcccccatctctcacggactgtcccaagtctagaaaagaattgagttcctcttctattagtcaaataaaagggaagagaatgtttgtcttcctttcctttctgtagtgttaagaaaataaacgaacttaatgattctaaattatcagtgagcttaacactgtactatagaccaaagattaccttttcaaaaagtcctttgaggtgaaatattttgtatacgtaatacatagatgcacatataaacacacacatatagaatctcaatattttaacacttctttgggtagttgtactaactcactaaccctgaggaaaaagttaagaaattgaaagtgttttcttcaaaagttgagatttaacaataaaaggtgttactttgataactaaaaggaactttattatcctcttcctaaaataaaccaatgcctattctgaaaatggcacttgcaattacaatttgccattatcaaagctaccactgaggtagaggcattatctaaaacaaataccacttatcatttattggcagttacctcgagagagacccatacacca

SEQ ID NO: 8953 - DNA, 68 bp, Homo sapiens
  misc_feature (1)...(68): n = g, a, c or t
tacttttatatttccatacaatcagaancagtnaaaaaaatttgganagnanataaaaacntnttaaa

SEQ ID NO: 8954 - DNA, 547 bp, Homo sapiens
gcccggccatcttatttattttaaaaatgtatgtatttatagatttaggaggtataagtgcagattccttacacgcatgtatcacatagtggtgaagtctgggcttttagtgtacctgtcacccaaatagtggacattgtattcaactggtaatttttcaatcctcagccaactccaacccagaaaagcactttgaaaaaatgactttggctgcagtgtagtttggaagtagcccatgctagatacaaggagcctagcaaaatattatcacagtaattcaaaggatagataatggtaggttagactagggtggtgactgtgaagatgaagagaaatgaaataaattgatcgataattaagaggtaaagttaggctgcgcatggtggctcacgcctgtaatcccagaactttgggaggctgaggtgggaagattgtccaagagttcaagaccaatctgggcaacatagtgagacctcgtctactaaaactcaaaaaaattagccgggcatagcggcacacgcctataatcccagctacctggggaggc

SEQ ID NO: 8955 - DNA, 602 bp, Homo sapiens
ctgcacatggattggttaacataatatatactgctatataatcttttaagggctaatatttgtagataatttaaaagcatgtcaatttcctctaagatttgattatttaacctgcacaaaggccaatcttcagttatcaatgacaagaaaactctagggctgccaaaataacttcattttagaccccagagttagtgttaggctggtaatgtttctaatttgggaataatgagactagaaagctaggagggccccctccaaatttctcccttgtattaggctgaagtagaacataacgtggcttaaagcataaacttaaagcatatgctttgagttttaaaaatgttaacctgtaattaattattagagtattatccatagtctactatgatagtcagttaatattctctaaatcagattatattcatttgaaaatgcatctgcatatttgcaaatgtgttattacacaagatcttacctatgtcaatttaaagaggttaaagatgcaggaagcccccactaaaatgtaaacacatttgtacggttttcagaatgtttggactcattctttcccattgacagagcagtaggttttaattaga

SEQ ID NO: 8956 - DNA, 381 bp, Homo sapiens
cctgagacctgggaggaagctggagaaaagatgccctctgaatctttgtgtttggctgcccaggctcgccttgacaccgaatggttgaaaacagatatacagatggtagtgtcgaaccaagtggaacaaagaaagaagatctgaatgacaaagagaaaaaaaatgaagacgaaactcctgcacctgtatatagggccaagtcaattctggagacctgggtgtgggtcaagcaaccaggtaatctgagttttggcactttggaaagcttgatctgacgctccttttctaaataacttggatggattattcgtattttttggtaacaattttaaaaaatgtaattaaaaaaatttaaatatcgtggtaaaatatacataccaa

SEQ ID NO: 8957 - DNA, 535 bp, Homo sapiens
  misc_feature (1)...(535): n = g, a, c or t
ccagaaaggaaactgacgagcaggtcacatgatcaggagccagactcctgagttgtaactgggcccccaactttccgtgtgattattaaaagagcccttcttcttttctaaaacttagtgccaaatgctgaggagcataatgtaggtgagaattttttttttggggggggtgaaaattaagctagagcttcttgaagtacctagtttccaggggctttntattgtatttttccttatggtcctagaatgacatcaacttggaaatgaagcttttgctganaaagctggaggtgatagtggtggtgattttgggagtggagtggacgtgataatgggaccctttaagtcatctatttcccaaggtgtntatcaaatgagagcagncctaacaatatataatctgttggggttgtaactatggtangacataataacatcggcaaaatgatttaattttctgcagcaggattgaaggttgcacgcagttaaaaattatgttaaatttatttacattaatgcaaaattgncatagacc

SEQ ID NO: 8958 - DNA, 607 bp, Homo sapiens
  misc_feature (1)...(607): n = g, a, c or t
ccatcggngctgaaattgagcattttaaatagtacagtaggctggtatacattaggaaatggactgcactggaggcaaatagaaaactaaagaaattagataggctggaaatgcttactttctgctctcattttctttcattttgtctgctgtctttttgaatgccaatactttcatttaaaatgttttgggagcacggcaacccaaaatgactgaacggtggtccaaaaatccaaaccaactgataattacttctcgaggtgataggaaaggcacaggaagttaggactttggctgaaatgatgaaaacacatgttcgccattttagggatcagcgcctcgactcctgccacctccggctccaacgatgatcatgtttggatgtatttattgaattgtcctttgctgatgaggaatttttaaagtatttcatagaataagtcctttggtatgcagatgctacatggaaggaaagaaagaaaaaaagaaaacacacaatattacttgctccataccctaaactgccgataccacagccgtaaaatgaaggtgtctagtagttgttatagcacggtagtccattctttctaaaggaccacttacggtt

SEQ ID NO: 8959 - DNA, 570 bp, Homo sapiens
  misc_feature (1)...(570): n = g, a, c or t
caatatttctaaatcatattttgatgacaacttacaggatcagtgattgagacaatgactagtgtatcaaacgctatctgatagttttcttagcatattccgtgtgtggnggtacatttattgtggtgtgcaaaatctgacaactgacgatttttctctgtcagcaaaactaacaaatttttaaaaatgattttaatagttataactaaaataagcttagacttccaagtcagtcaaatgcccaaactgcatgttttctgccgttccccaaatncttttacatgttttaaatagcctttagaatatgatcgatcacatggctgtatttcagatctaaaagttttgagattttcaaaatcaaaaattactttnttatgcaaaatggcaatgcaaacagcaatcctacataatgtagaataatttttcttctgtacggctccttctaaaaaatgggtaaccacacacacacacacacacacacacgacataaatttagtccatctgaagaagcactccagctttctaattccacttttgaaggaaaaggcagaggcatgtttacattatccc

SEQ ID NO: 8960 - DNA, 86 bp, Homo sapiens
ggaatcatataatataggtactttgtccctgattaaataatgtgacggatagaatgcatcaagtgtttattatgaaaagagtggaa

SEQ ID NO: 8961 - DNA, 458 bp, Homo sapiens
tcgacacgatgacacacaataatttttggttgaagaagatagaaatcagtgtttcagaagcagaaaaacgaactggaagaaatgccatgaacatgcaagaaacatatactgcttacctcattgaaacaaggtcagttgaacataccgatggtcagagtgtcctaacagactcactatggcggcgatatagtgaatttgagttgttgagaagctaccttttagtttactatccacatattgttgtgccacctctgccagaaaaacgggcagaatttgtttggcataaactctctgctgacaacatggatccagattttgtggagaggcgacggattggtttagaaaactttctcttgaggattgcttcacatcccatcctttgtagagacaaaatcttctatctgtttttaacacaggaaggtaactggaaggagactgtgaatgaaactgggtttcag

SEQ ID NO: 8962 - DNA, 603 bp, Homo sapiens
  misc_feature (1)...(603): n = g, a, c or t
ccactgtgtagcaccttctaattcaatttcatcggcagttgtaataacagttccagcctcaggtgttttaatggtgggaaacatcttgattgcttctccagaaacttgaccatcggttttgttttggaaatcttggagaatctcagttccttccacagcaataagttctgtgggagaagcttccatttcttctaataactcaggtttaccatcatcttctgaaggttctaattttgtgtcaggagataaagagggaggctcagttatgtgaaggtattcctcacttgatggtttgaaagtcgcttcaatatttacatgaatttccttaaaagaatcctgtggggacattacagatgagccgacgtctattcctggcagagcactgggctgggggatctctgtgtgtccagaggcttcactgcctgagtagatagtgaggggagatgatggtgtctgagaagacaacttcgcaaatgttgaaactgctaatgttgtatcagtgtaatatgggggattggatccttccatnacatcaggcacctctgttacactctgatccataaggngggtagtagcaatacttanatagggagtatggtctac

SEQ ID NO: 8963 - DNA, 596 bp, Homo sapiens
gttgtagggttgccagatgcaatacaagattcctggttaaatttgaatttcagtaaacaatgaatagtttttcattgtaccatgaaatatccagaacatacttatatgtaaagtattatttatttgaatctacaaaaaacaacaaataatttttaaatataaggattttcctagatattgcacgggagaatatacaaatagcaaaattgaggccaagggccaagagaatatccgaactttaatttcaggaattgaatgggtttgctagaatgtgatatttgaagcatcacataaaaatgatgggacaataaattttgccataaagtcaaatttagctggaaatcctggatttttttctgttaaatctggcaaccctagtctgctagccaggatccacaagtccttgttccactgtgccttggtttctcctttatttctaagtggaaaaagtattagccaccatcttacctcacagtgatgttgtgaggacatgtggaagcactttaagttttttcatcataacataaattattttcaagtgtaacttattaacctatttattatttatgtatttatttaagcatcaaatatttgtg

SEQ ID NO: 8964 - DNA, 606 bp, Homo sapiens
ctgaaggtttttttattctttctttttttaaagtgagcccatgatttggtgtctttcccagattatcccctttgcgacaacacaagcaaaaatatttacaaaggtaaggcatagtcaaactacataaagagaaaaaatcatgaggaaaatacatgaaaaagactaaagacttcgccataacaaggtcttagtgataatagtgtccgtaaagatgtcatcagaattggtaaagtcaagcatgctgcaaatataccctttggattagaaaagagcacaattttctttttttgttttgttctgttttaagaagtggcatactgctctttctccctttggataatttcttttaagcccatcaaaggaaaaaacaaacacaattcaaacaaacactgtcaagtgattcaagatcaaatatttacaataatcaaatggagtatcagattttttttttccaaactgataccacaaatacagagctgaaatctctctttggctcctctatatgcaaaattgaattagtcttcattgaagacaattatatagtcagttccagatgcaaaaggaaacagccttacaaggccctaaagaacacatgctcctacccta

SEQ ID NO: 8965 - DNA, 243 bp, Homo sapiens
agccaatcttcattgctcaagtgtctgaagcagccatggcagaagtacctgagctcgccagtgaaatgatggcttattacagtggcaatgaggatgacttgttctttgaagctgatggccctaaacagatgaagtgctccttccaggacctggacctctgccctctggatggcggcatccagctacgaatctccgaccaccactacagcaagggcttcaggcaggccgcgtcagttgttgtgg

SEQ ID NO: 8966 - DNA, 520 bp, Homo sapiens
  misc_feature (1)...(520): n = g, a, c or t
cctggtgcaaatcaacaaaagtaatgggaaggagacagtggtagggagactcaacgagactcacatcttcaacggaagtaattggatcatgctgatctataaagggggtgatgaatatgacaaccactgtggcaaggagcagcgtcgtgcagtggtgatgatctcctgcaatcgacacaccctagcggacaattttaaccctgtgtctgaggagcgtggcaaagtccaagattgtttctacctctttgagatggatagcagcctggcctgttcaccagagatctcccacctcagtgtgggttccatcttacttgtcacgtttgcatcactggttgctgtttatgttgttggggggttcctataccagcgactggtagtgggagccaaaggaatggagcagtttccccacttagccttctggcaggatcttggcaacctggtagcagatggctgtgactttgtctgccgntctaaacctcgaaatgtgcctgcagcatatcgtggtgtgggggatgaccag

SEQ ID NO: 8967 - DNA, 596 bp, Homo sapiens
  misc_feature (1)...(596): n = g, a, c or t
caaaacgcagcantatgactgcaaatggtacattccgctcacggatntnagcttccanatggnggatgaactggaggcagngcccaacatccccctggtgcccgatgaggagctggacgctttgaagatcaagatctcccagatcaagaatgacntccagagagagaagagggcgaacaagggcagcaaggctacngagaggctgaagaanaagctgtcggagcaggagtcactgctgctgcttatgtctcccagcatggccttcanggtgcacagccgcnncggcaagagttacacgttcctgatctcctctgactatgagcgtgcagagnggagggagaacatccgggagcagcagaagaagtgtttcanaagcttctccctgacatccgtggagctgcagatgctgaccaactcgtgtgtgaaactccagactgtccacagcattccgctgaccatcaataaggaagatgatgagtctccggggctctatgggtttctgaatgtcatcgtccactcnnccactggatttaagcagagttcaaatctgnactgcaccctggaggtggattcctttgngtattnngtgaataaag

SEQ ID NO: 8968 - DNA, 601 bp, Homo sapiens
  misc_feature (1)...(601): n = g, a, c or t
caccatattggccaggttggtctcgaactcaccatattggcctcaggtgatccgcccgcctcngcctcccaaagtgttgggattatgggcgtgagccagccacggtgcccggcctgttttattgtttgaaaaacaagtacaggttgttattatccaagaattgttgatagagtatatactgtatttgaagtgtanaactgaggcagaggctgattaatataactagtttacatttgttagnctttcacatctgtgaaggaataaagtacagacaaaagtggaaaacaaaccaggaaaaacaaattgtgaagcacagagctgcttaaaagaaaaaagtcacagaaataagtcagtattttgtttagagactagaactccaactgctagccaactgcctagaatatagtaaatattttctagtttcttaaatgactagtaatattcctacattatgtgatggcatttcccaaactgtttaattagatgttagatttgtagccaaatatgtctaggaaatgcttaaacaatataaaacagttttaatgattggctttttagaacgttatatattagtgtgctttatgcatatccaagaggngag

SEQ ID NO: 8969 - DNA, 457 bp, Homo sapiens
ggtgggcgcgccttaatgataaggagggatatgttccacgtaacttgctgggactgtacccaagaattaaaccaagacaaaggagcttggcctgaaacttccgcacagaattttagtcaatgaagaattaatctctgttaagaagaagtaatacgattatttttggcaaaaatttcacaagacttattttaatgacaatgtagcttgaaagcgatgaagaatgtctctagaagagaatgaaggattgaagaattcaccattagaggacatttagcgtgatgaaataaagcatctacgtcagcaggccatactgtgttggggcaaaggtgtcccgtgtagcactcagataagtatacagcgacaatcctgttttctacaagaatcctgtctagtaaataggatcatttattgggcagttgggaaatcagctctctgtcctgttgagtgttttcagcag

SEQ ID NO: 8970 - DNA, 485 bp, Homo sapiens
ctgcctttgctaaaagtgctgccatgttaggtaattctgaggatcatactgctttatctagagctttgtctcagcttgcagaggttgaggagaagatagaccagttacatcaagaacaagcttttgctgacttttatatgttttcagaactacttagtgactacattcgtcttattgctgcagtgaaaggtgtgtttgaccatcgaatgaagtgctggcagaaatgggaagatgctcaaattactttgctcaaaaaacgtgaagctgaagcaaaaatgatggttgctaacaaaccagataaaatacagcaagctaaaaatgaaataagagagtgggaggcgaaagtgcaacaaggggaaagagattttgaacagatatctaaaacgattcgaaaagaagtgggaagatttgagaaagaacgagtgaaggattttaaaaccgttatcatcaagtacttagaatcactagttcaaacacaacaacag

SEQ ID NO: 8971 - DNA, 380 bp, Homo sapiens
ccaaggctttatattgttgctgtgtaacaacttacctcaatacttaagagcagttcagagaaacaaaccagcatctatgggtcagcaattgggagcaacttaactgattctgggtaaagctcaaggttccaatcacagaaaactaggattggagaatttttttaatatccagagtggcatactaacagctttaaagttaatcctggttgtcatcttccctcggtgagtgatttgagcaagaaaagctgtaaattgaacacgctctacgaagtagtcgtgctatcttgcatcctttatggtcacagaatgtggtgggagggttcttttccctggtacaattaccaagcaggcagggagcattgggaactctcagatgccag

SEQ ID NO: 8972 - DNA, 297 bp, Homo sapiens
ccactgaactgcgctgccagtgtttgcagaccctgcagggaattcaccccaagaacatccaaagcgtgaacgtgaagtcccccggaccccactgcgcccaaaccgaagtcatagccacactcaagaatgggcggaaagcttgcctcaatcctgcatcccccatagttaagaaaatcatcgaaaagatgctgaacagtgacaaatccaactgaccagaagggaggaggaagctcactggtggctgttcctgaaggaggccctgcccttataggaacagaagaggaaagagagacacag

SEQ ID NO: 8973 - DNA, 478 bp, Homo sapiens
  misc_feature (1)...(478): n = g, a, c or t
ctgaaccctcgtggagccattcatacaggtccctatttaaggaacaagtgattatgctacctttgcacggttagggtaccgcggccgttaaacatgtgtcactgggcaggcggtgcctctaatactggtgatgctagaggtgatgtttttggtaaacaggcggggtaagatttgccgagttccttttactttttttaacctttccttatgagcatgcctgtgttgggttgacagtgagggtaataatgacttgttggttgattgtagatattgggctgttaattgtcagttcagtgttttaatctgacgcangcttatgcggaggagaatgttttcatgttacttatactaacattagttcttctatagggtgatagattggtccaattgggtgtgaggagttcagttatatgtttgggattttttaggtagtgggtgttgagcttgaacgctttcttaattggtggctgcttttagg

SEQ ID NO: 8974 - DNA, 366 bp, Homo sapiens
ccttctcccctcctccagagagggggcaggtgaggggctatcaggaacacgctccttaataactgatgtctcaactctggatgggggactctgaacttgtgctgctgctgccatatttgcaatggtgctgaggtggttcatctggctcattgccatggtgacagatgctggaggtaggctgacaggaattagggggtggggcatcatcataaaaggaagttccagtccgacacttgaattcatgtccccgttttcagagtctgctccatgttggttattactggcatgatagttgctcatggcttctaatttgattttttttcaccttcattgcttcagcaatagctgcattggtagcagcagcag

SEQ ID NO: 8975 - DNA, 406 bp, Homo sapiens
tttttatttagcgatgttttatttagctgaaatgttatttcacttgtaaaaactatctccggttacaaaaaaaaatcagaaaccttattaaatttaacctgcttttacaaatgtcctaagaagtcttaagctaaacaaaatttaagtaggaaaacgataatttaaaaatagtgtgttatactatttctgtggtttatgtacatatattaactggtctcttggataggaaacatgactagaagtttatcacactaagcactgtaaaataaaggcaagagctaatcatcttctagaaaaatagtctctatgcaacaattgcaaatgtcaaagctattatttagtagttaattgcctgctacaatacataaaacaaagtacatttactggattgtttttcagtttgcag

SEQ ID NO: 8976 - DNA, 559 bp, Homo sapiens
ccaaaagattgacagtcctgggttgtccagcctggagattgcctttgtggaattgccagaattggtattgctgtatttgggattctgaatcttggcataacagttttggcactttctccacctgagcttgctgtccttcggcttgaacattttggaattgtcctttcggggatttcttctcttgggccggctggtcttcagtttgctgatcctgggtttgcttctttgagttttgctccttatcagtctgctggtctttaacttgtctatctttagattgtccttctgggtattgttcccctttggcttgctgatcttcagcttgctgatctgggagttgctctttagtttgattaagttgagcttgcttatctacggagtgcctctttggggatagccagtctttgatttgctggtctaaggatttctgctttggagattgccagcctttgctttgctgatctaaggaatgcctctttgaggatttctggcctttggcttgcacgtctaaagaatgtctccttaagtattgcaaggctttggtttgctggtttaagga

SEQ ID NO: 8977 - DNA, 502 bp, Homo sapiens
ccaagaagcaacagagatataaagctgaatcttgtagctaacccctgaaagcaagccaacgcaaattcctccgccaggccagtcttctagtgccaatatggagactgtgggccacagaagattcccttctatttcaggttctcaaaaagtggtgtagactcaggcaaatgccaggaaatgtgtccatatgccagaggagacacagagccagaaatgaaggctatgggtcctgtcttcagtgaaacactgaacgctctcggaaagctcccatcattcttgcatcgctactgccaccaagacggtggcaagggaggaggctaactttcaaatgcatgcaacggcaggtaatatactgtggaagctggaggtttacttttcatgttttagttactttcttgcaaacagcagtccaggaaagcaagcaagcaggtaaaactccgggtgtgcatgaggagatgatccaaggccagtgggcctcccagtgagaaccaaacaggagtgg

SEQ ID NO: 8978 - DNA, 556 bp, Homo sapiens
  misc_feature (1)...(556): n = g, a, c or t
cctaacccctgggagggtaaatgtgggtttctagaatactaagtaaatttgactaacaatgccaaaatgccccctgcctgttttgggacgtttacctcagtccctaatgggcttcagacctgaaaaatgcaatgtctggtttgggcactttgggcctgtaagccttcttggtgaagagcagaaactttgcagtaacaccttcagtgagttcaaggctaggatccctgtcaacattatttaatctctttgagctttagcaaaatagggtagataatggtagttatttcatagggttgtgtgcagcttaagggagatcatgaatggacatttctaacccaatgtgacaatcagtgaccaatatgttttggctttttcaaaccaagaatctagttgagtccacagccacttctttcttgaaaaaaaaaaaaaaaagcattcaggagtgcaagttttctgctatagaaggcagtgggtacagacagaccttccctgagtggagggctggganagagtctgcatggggacatccctccaagcaacttcagagtgacagaag

SEQ ID NO: 8979 - DNA, 360 bp, Homo sapiens
ctgtctcttacttttaaccagtgaaattgacctgcccgtgaagaggcgggcataacacagcaagacgagaagaccctatggagctttaatttattaatgcaaacagtacctaacaaacccacaggtcctaaactaccaaacctgcattaaaaatttcggttggggcgacctcggagcagaacccaacctccgagcagtacatgctaagacttcaccagtcaaagcgaactactatactcaattgatccaataacttgaccaacggaacaagttaccctagggataacagcgcaatcctattctagagtccatatcaacaatagggtttacgacctcgatgttggatcaggacatcccaat

SEQ ID NO: 8980 - DNA, 224 bp, Homo sapiens
ctggtgttaatggcatgcaggcatatgtgatgccaaccatgagggctggaagaaccagaagccaaagaagaatatgaccgcatctattctaaagctactgtggtggtttctcatgcttcagagtctcgtaagtctcctggttcctggtgctcaggcccgtgtaaacaccatctgatttctcatagctggttatagctgcctttcgcacttggatcttcagtcga

SEQ ID NO: 8981 - DNA, 593 bp, Homo sapiens
ctggtttcagtgaaactgccaaaatcctcaagccaggaagtagaagccaaggagctgtcctttgttttggattacataaaccagtcacccaagtgcattgcctttggaaacgagggagtatatgttgctgcagtacgggaattttacttgtctgtttattttttcaaaaagaaaacaacatcaaggtttactttatcatcatcaagaaataagaagcatgctaaaaacaattttacgtgtgtagcatgtcacccaacggaagactgcatcgcatctggtcacatggatggcaaaattcgtctttggaggaatttttatgatgataagaaatatacgtacacatgtttacattggcaccatgatatggttatggatttggctttttcagtgacaggcaccagtctgctgagtggcggtcgtgaatctgtacttgtagagtggcgcgatgcaacagagaagaataaggagtttctcccgcgtttaggagctactattgaacatatctcagtctcgcctgcaggagatttattctgcacttctcactctgataataagataataattattcaccgaaaccttgaagcatccgcagt

SEQ ID NO: 8982 - DNA, 591 bp, Homo sapiens
ccatatccttgtctaaaatgtatattgaacaaaatgcatgctcttgaaatgtctcaaaaccttacaccctgggaataattgcatatataacttgtgtttggagaatcacatgaactttaatcagggtaatagcactttcaaacttgctagtagattttactgtaggtgtaatgccttaatcatctttttgaatgttttctcagagctggaggttgctgggcacctaaatgatgtttcatgatagctttgggtgattttactgctatttataatttgctgtataaagtgagcattacttaatttgcaagctgatttctcacagtgtaaatttgttcattcctggtagtctattttctataaaaatgtatttttgcacaacatttttaaaaactggtgtaccttcatctatgacgtgttccattttgacaaacagctttcaggcgtaaatccagagaagtgctttatatgaaatgtattattttgaacagagtttgtgatttggtagttattttatgttgttgaaatttgaatttcacaattcttagataattatttcaaatggatattgatgcattcttgttaccagatgtt

SEQ ID NO: 8983 - DNA, 582 bp, Homo sapiens
cctagtagtggggtgaggcttggattagcgtttagaagggctatttgttgtgggtctcatgagttggagtgtaggataaatcatgctaaggcgaggatgaaaccgatatcgccgatacggttgtataggattgcttgaatggctgctgtgttggcatctgctcgggcgtatcatcaactgatgagcaagaaggatataattcctacgccctctcagccgatgaacagttggaataggttgttagcggtaactaagattagtatggtaattaggaagatgagtagatatttgaagaactgattaatgtttgggtctgagtttatatatcacagtgagaattctatgatggaccatgtaacgaacaatgctacagggatgaatattatggagaagtagtctagtttgaagcttagggagagctgggttgtttggattgtggctcagtgtcagttcgagataataacttcttggtctaggcacatgaatattgttgtggggaagagactgataataaaggtggatgcgacaatggattttacataatgggggtatgagttttttttgttagggttaacgagggtg

SEQ ID NO: 8984 - DNA, 549 bp, Homo sapiens
  misc_feature (1)...(549): n = g, a, c or t
ccagttttcttccttggagtagcaatctgtaaaaataagtgctgctgtttaaaaagtagcatgccctacaccataccaatgtattagtgagaatttggcgattctcaccaaacaacaatgaagtttcacatttggtactggatggagcttgggttagatctgccttttaaggcaaagtcaactctttcaacttaattctttttcaagggagtaatgtactgtctacacttggcttaaactaacttctattatggactactttcaatgtacatgtaaatattcatgcatcagaagccaatttcttttaacagtacatagaaaaggtatattttggggtgctaatgaacacttcaaattaagtaatgatattggtaaggatcaaactgcactattagtcttgttaataccacactggcacacacactgcatatatatgtattttcctaagataaaactcttctcagaatttcattactttttattatacaccaactagtttatattgnagttctttacaaagaaaatgctaagaaaaattataatcacatg

SEQ ID NO: 8985 - DNA, 270 bp, Homo sapiens
ctggtgtttatccgtcactcgccgaggttccttgggtcatggtgccagcctgactgagaagaggacgctcccgggagacgaatgaggaaccacctcctcctactgttcaagtacaggggcctggtccgcaaagggaagaaaagcaaaagacgaaaatggctaaattcgtgatccgcccagccactgccgccgactgcagtgacatactgcggctgatcaaggagctggctaaatatgaatacatggaagaacaagtaatcttaactgaaa

SEQ ID NO: 8986 - DNA, 507 bp, Homo sapiens
  misc_feature (1)...(507): n = g, a, c or t
attgacngtcctgggttgtccagccnggagattgcctttgnggaattgccagaattggtattgntgtatttgggattntgaatcttggcntaacagttntggcactttctncacctgagcttgctgtccttcggcttgaacattttggaattgtcctttcngggatttcttntcttgggccggctggtcttnagtttgctgatcctgggtntgcttntttnagttttgctccttatcagtctgctggtctttaacttgtctatctttagattgtccttctgggtattgttcccctttggcttgctgatcttcagcttgctgatctgggagttgctctttagttngattaantngagcttgcttatctacggagtgcctctttggggatagccnntntttgatttgctggtctaanngatttctgctttggagatngccancctttgctttgctgatctaaggnatgcctctttgangatttntggcctttggcttncacgtcnaaag

SEQ ID NO: 8987 - DNA, 364 bp, Homo sapiens
  misc_feature (1)...(364): n = g, a, c or t
cctattctgaactgcanatgctgtcccccagcgagcggcagtgtgtggagacggtggtcaacatgggctactcgtacgagtgtgtcctcagagccatgaagaagaaaggagagaatattgagcagattctcgactatctctttgcacatggacagctttgngagaagggcttcgaccctcttttngtgnaagaggctctgganatgcaccagngttcanaagaaaagatgatggagtttcttcagttaatgagcaaatttaaggagatgggctttgagctgaaagacattaaggaagttttgctattacacaacaatgaccagnacaatgctttggaagacctcatggctcgggcaggagccag

SEQ ID NO: 8988 - DNA, 325 bp, Homo sapiens
  misc_feature (1)...(325): n = g, a, c or t
atcacattctcgatccagaggaangcgatactctcgctcacgcancaggagcaggggacgaaggtcaaggtcagcatctcctcgacgatcaagatctatctctcttcgtagatcaagatcagcttcactcagaagatctangtctggntctataaaaggatcnaggtatttccaatncccgtcgaggtcaagatcaagatccaggtctatttcacgaccaagaagcagccgatcaaagtccagatctccatctccaaaaagaagtcgttccccatcaggaagtcctcgcagaagtgcaagtcctgaaagaatggactgaagctct

SEQ ID NO: 8989 - DNA, 426 bp, Homo sapiens
ccagtcaacatctacagactagaagggagaaaagaagtcattaaaacagatattactgttgtggtaagcatttgctggtaatgctgtataaatttaatagttttaatatagtgcaacagaagaaactgcatttgaagaaaagagctattgaataccataaattaaccctcaagtctgttctaggtattcttgggcctgaggtcttctgaattaattgagtagcagtatttggctactcagttggttattaactgtgctttttgactgataagagaatacatttaaattttttaaatggtatttatggggccaggtgtggtggctcacacctttaatcccagcactttgggaggccgatcaattatatagatcaacatgatcaaggtgggcagaccactcaaagtcaagagttcaagaccagcctgg

SEQ ID NO: 8990 - DNA, 494 bp, Homo sapiens
ccttatttctcttgtcctttcgtacagggaggaatttgaagtagatagaaaccgacctggattactccggtctgaactcagatcacgtaggactttaatcgttgaacaaacgaacctttaatagcggctgcaccatcgggatgtcctgatccaacatcgaggtcgtaaaccctattgttgatatggactctagaataggattgcgctgttatccctagggtaacttgttccgttggtcaagttattggatcaattgagtatagtagttcgctttgactggtgaagtcttagcatgtactgctcggaggttgggttctgctccgaggtcgccccaaccgaaatttttaatgcaggtttggtagtttaggacctgtgggtttgttaggtactgtttgcattaataaattaaagctccatagggtcttctcgtcttgctgtgttatgcccgcctcttcacgggcaggtcaatttcactggttaaaagtaagagacag

SEQ ID NO: 8991 - DNA, 376 bp, Homo sapiens
ccatcaactggaactatgtcattatttataaaacaggagcaatcacagggctgtggtgagaatcacatgaggtgacacatgtgaaatggtcctttcccctaagacatatataattgtgacaaggaacaaaatttacatagaaaataattacagaacaacgtaggaccatgtcttcatttctccctggagcggatgtaaaataaggtgattgatttgagcaagcatgttatgaatatttagaaatgtcttctagggaagcaagctggcgctcaccgattttggtttgccaggcatatcagaaggcactttgtgacaggtgcagtagggacgcggagtgatctcttcacgtgtaggcaatgcccagcccacacctagg

SEQ ID NO: 8992 - DNA, 173 bp, Homo sapiens
ccatgggggacgtgctgtccacgcacctggacgacgcccggcgccagcacatcgcagaaaaaaccgggaagatcctgacggagttcctccagttctatgaagaccagtatggcgtggctctcttcaacagcatgcgccatgagattgagggcacggggctgccgcaggcccag

SEQ ID NO: 8993 - DNA, 599 bp, Homo sapiens
cctaagtaaatgaagagctgtaccatattcatgtattggaagacaacattgtaaagatgacatggtttaccagattaatctataaattcaatacaaatccaatcaaaatttcaatgctcttgggtttgtttgatttataaattgttggtctaattctagaagtaatatggaggaacagttggctaagaatagccaagacactccaaggaagaacaattttgtggtgatactggagacagaggtgaaattggttacaattatgacaaaatgtggaggcatcttggtttttatcagaccttttcctaaagttgcaataatcaggactgtactgtactgctacaagattagacaaattgatgtcagtcagaatagaaaccatcaaaagacccacacacatacacaaaaatttaatttatgaaagaggcagtgttacaaatcactggggaaaggatgaacttttcagtaaatagtgcagagacaaccacttcgaatatgaaaaatgttaagttgaatttctaactcataattttcacaaaaatcagttcaggacagactaaagacaaatgtgaaaggcaaaactataaaatttccacaaggca

SEQ ID NO: 8994 - DNA, 597 bp, Homo sapiens
  misc_feature (1)...(597): n = g, a, c or t
ccaagaacctcttccaccgggccatttctgagagtggcgtggccctcacttctgttctggtgaagaaaggtgatgtcaagcccttggctgagcaaatttctatcactgctgggtgcaaaaccaccacctctgctgtcatggttcactgcctgcgacagaagacggaagaggagctcttggagacgacattgaaaatgaaattcttatctctggacttacagggagaccccagagagagtcaaccccttctgggcactgtgattgatgggatgctgctgctgaaaacacctgaagagcttcaagctgaaaggaatttccacactgtcccctacatggtcggaattaacaagcaggagtttggctggttgattccaatgcagttgatgagctatccactctccgaagggcaactggaccagaagacagccatgtcactcctgtggaagtcctatccccttgtttgcattgctaaggaactgattccagaagccactgagaaatacttaggaggaacagacgacactgtcaaaaagaaagacctgttcctggacttgatagcagatgtgatgtttggtgtcccatctgtgattgnggccc

SEQ ID NO: 8995 - DNA, 568 bp, Homo sapiens
cctggtcatagaagtgtaaacaatgtaaatgaatccaccattaccagttgtcatatcatatctatgtcacctgtgtattctgagattacacacatacctgccaatatacctgggaaaggttattttatcacagttacacttgagttcttggcaggcaggactgaggaagagtaatttgaaagaagttttacatcctatttagaagaaatcactagtatttccttaaataacaggttacaatagaaagatactgcctggaagttatcctttcactttggttcatttttagtttttctttatgatttacatagctgtttaattcatttgcttatagtacaatcctgccataaagtattaaagcacaagatacctattattccttcaacatctgcatttttcaagttttatactctacatccacagtacgtcagcagttcttgaatgtttaaaaaaataaatgggtaaaatgcttctaaaaaatgcagatgtttataactacaatggtactaagatgggaaggagacaatgagagaagggataaaagcaaacatgttcatgtgcagggaat

SEQ ID NO: 8996 - DNA, 436 bp, Homo sapiens
ctgagaatcctgggggagaaagaggccaagctggcccagcagagccaggccctacaggagctcatctcagagctagatcgaaggtgccacagctcagcactggaactgctgcaggaggtgataattgtcctggaaaggagtgagtcctggaacctgaaggacctggatattacctctccagaactcaggagtgtgtgccatgtgccagggctgaagaagatgctgaggacatgtgcagtccacatcactctggatccagacacagccaatccgtggctgatactttcagaagatcggagacaagtgaggcttggagacacccagcagagcatacctggaaatgaagagagatttgatagttatcctatggtcctgggtgcccagcactttcactctggaaaacattactgggaggtagatgtgacaggaaaggagg

SEQ ID NO: 8997 - DNA, 599 bp, Homo sapiens
  misc_feature (1)...(599): n = g, a, c or t
cctttctcaatttacagagttgaagaggaaaggcaaatggaggaataaacttcattgtcattgggattaatttggctagactcaatctcttgagccttaaaatgagaaagtaatatccattacatgtttagagttctcaaatagttgatactattattaaatgtttcaaattttattggggtagatactaaaaattagtacactgtcctaatgaagtttaaatgaacaagttttacatttcttaggattcaggaatatatggaatctagttgtatttaattgacttgagagccacagagattgtgttgatttatgagctggactcctattgttttagaaacatgcagtaatgattaacttgtgtcaatgatggtaatgagaccaaacttgtacatttaattaagggtaccagttctttttatgttactagactataccttggcctttaaaaatgaatctcactgattaaagagaacaggcattattaggatagcattccaccacaactagaaacattcaaataatgtgtcttaattgnaatctgtatataggaaaatttttcctatggatatttttggtgttttaccacagtgaactga

SEQ ID NO: 8998 - DNA, 411 bp, Homo sapiens
ctgtcctcacgggcccctggagaaaccgcaggtacacagatgaaggcatggacaggagaagaggggacccggggttgagaataagatagaaggcaaagagaactggggagcagaggagagaggagaaaaatgacacctccggtattgactgctcagtggtacctactggcgctaagcacagtaaaaacacaaaggctactttccaaaaggaaaacaacatcatttaaaaagaaaaagaaaaaaaaccaaaacagccctattcgcccatgagtgtgggaagtgaggaaattatataatacgcctcctccaaggaccccaaacaccctctctgctgtaattaagagaagtgcttactgccagcaccgtcctgccatacctgcttgtgtgactttgaacaagtgtcttatcctc

SEQ ID NO: 8999 - DNA, 381 bp, Homo sapiens
tcgacatttgggggcaagggttccactgaaaaatcccccaaattcacgctgaggtttcaggtcatggttgctgaggtggaagatgaggtcagggctcttggagattttccaacccaccctagaacttgtttctaaatggctggggaagaggtcagtataggtccccccgttactgcagatgaaggcagaagtcattctctcccccacccctcaacttcttcagagatgtggagataggaggcttcgatctctaattgcctacgatctcttaaaaatataaaacacgtgcagttgactttggtacaaaaaagaaaacaaaagaacaacaaaacattctggtccctgtgggttttttccctcacccccaacaaaccattatgg

SEQ ID NO: 9000 - DNA, 372 bp, Homo sapiens
ctgcggttcaagaaaaggtccaaaggaggacccactcgaggtgaggataaatcacaattgtgatcacagaccaggtttctatcttttttattccctttaataaattgggcttgacctgaaactccaagaaagttaatttataacagccaaaataattttttttacgtaacagcccacctttctttttcttttaaacttaaaccattatgacaaatggagatttattacataccataaacacatgtggcttgagcactggtatttagtctggaaactcagatggggcagtaagctgctgctgcaatcaggaaatgccatgtgacattcttgataaagacgaaacacacacacattccacagcacttattgtgg

SEQ ID NO: 9001 - DNA, 375 bp, Homo sapiens
ccatcaactggaactatgtcattatttataaaacaggagcaatcacagggctgtggtgagaatcacatgaggtgacacatgtgaaatggtcctttcccctaagacatatataattgtgacaaggaacaaaatttacatagaaaataattacagaacaacgtaggaccatgtcttcatttctccctggagcggatgtaaaataaggtgattgatttgagcaagcatgttatgaatatttagaaatgtcttctagggaagcaagctggcgctcaccgattttggtttgccaggcatatcagaaggcactttgtgacaggtgcagtagggacgcggagtgatctcttcacgtgtaggcaatgcccagccgacacctag

SEQ ID NO: 9002 - DNA, 596 bp, Homo sapiens
ctgcacatggattggttaacataatatatactgctatataatcttttaagggctaatatttgtagataatttaaaagcatgtcaatttcctctaagatttgattatttaacctgcacaaaggccaatcttcagttatcaatgacaagaaaactctagggctgccaaaataacttcattttagaccccagagttagtgttaggctggtaatgtttctaatttgggaataatgagactagaaagctaggagggccccctccaaatttctcccttgtattaggctgaagtagaacataacgtggcttaaagcataaacttaaagcatatgctttgagttttaaaaatgttaacctgtaattaattattagagtattatccatagtctactatgatagtcagttaatattctctaaatcagattatattcatttgaaaatgcatctgcatatttgcaaatgtgttattacacaagatcttacctatgtcaatttaaagaggttaaagatgcaggaagcccccactaaaatgtaaacacatttgtacggttttcagaatgtttggactcattctttcccattgacagagcagtaggtttta

SEQ ID NO: 9003 - DNA, 599 bp, Homo sapiens
  misc_feature (1)...(599): n = g, a, c or t
cctatgcatagttaataaggttataatctactcaacatggaaaatggagcctatttgcaaacacacaagtaattaaagtaccaattctctcttagtttctttttttatagttggtttattttgcaattataaatgttaaacatccctagagatgaaagttaaaatggttgatcacagatcagtagcaaaatacaaattgacaattcaaaattataaataaaactctgttgaggatgtttaactttgagtctccaaatttaagagctaagcttggaagaaacaaatttataggttatatttccctcttaaattaaaaaacaaacttcctctggcagtagtttgtgaattcctttcattgtaatgataccatgattacaggatcaaaaatgcttaacttacttgccattctgctcacatcatcacagttgtttttttttttttaagcactcaatgtaggcattttaatcttctggataacagagtatcttttgagaaattaaaatcgaattgaccatttgcaatatttggttttcctaataggtactgncttagtaaatgtttaaatccaaacaaatcttctgttcaccggaaaaatacta

SEQ ID NO: 9004 - DNA, 602 bp, Homo sapiens
ctgtagtgcccccccctccactttggtaaacgactcaagttccatgaggactttcacttctttatttataatcacagaagtgaggtgttacttcacacacatacacacacaaagaatgaaataaagaaatgaaactcgctaagcagacaaaaacagacaactttctgcttagaaaacagccttctcggtgggagaggatgaactgccatgtctaagagaaagacttgcccccgaatttgtaggtctgtaactgaccaagttttgtaattattaacaggtatttgccaagtcctaattgctgaatataatgaattggaactagatgcgaaaatagagcaggacctctccccttgatgagtttttattccagccatataattctcaataaaacttttcctgggctggatagcaaaggacacctttggttacctgaatgaacaggtacaggggaaattatttgggggagggaaaaaggagagaaaagcaaggagagagagtgtgagtgtaagagaaagtgaagaagccactcttgagaaaagcttgccataaaggagctaaacccacctgaaattcctacccacggacaccccttctcacttcag

SEQ ID NO: 9005 - DNA, 390 bp, Homo sapiens
aaacagaggcttgcgataggcttttggctcatcgagtggaaaccaaaatgaagggaaataaagtgaatgaggtgctgaatagactgcacctggctatcccaaccaggagggacgataagaagaggccccctttcatccctgaaggagtggtggctcgcaggaagaggatggaaactgaggagtccaggaagaagagggaacgagatcttgagctggaaatgggagatgattatattttggatcttcagaagtactgggatttaatgaatttgtctgaaaaacatgataagataccagaaatctgggaaggccataatatagctgattatattgatccagccatcatgaagaaattggaagaattagaaaaagaagaagagctgagaacag

SEQ ID NO: 9006 - DNA, 589 bp, Homo sapiens
ctgcacgcagccatggctgacacattcctggagcacatgtgccgcctggacattgattcaccacccatcacagcccggaacactggcatcatctgtaccattggcccagcttcccgatcagtggagacgttgaaggagatgattaagtctggaatgaatgtggctcgtctgaacttctctcatggaactcatgagtaccatgcggagaccatcaagaatgtgcgcacagccacggaaagctttgcttctgaccccatcctctaccggcccgttgctgtggctctagacactaaaggacctgagatccgaactgggctcatcaagggcagcggcactgcagaggtggagctgaagaagggagccactctcaaaatcacgctggataacgcctacatggaaaagtgtgacgagaacatcctgtggctggactacaagaacatctgcaaggtggtggaagtgggcagcaagatctacgtggatgatgggcttatttctctccaggtgaagcagaaaggtgccgacttcctggtgacggaggtggaaaatggtggctccttgggcagcaagaagggtgtgaaccttcctgggg

SEQ ID NO: 9007 - DNA, 380 bp, Homo sapiens
caaacatgatcatcgttggagccggaggtggcaggagtcgaggcgctgatccctaaaatggcgaacatgtgttttcatcatttcagccaaagtcctaacttcctgtgcctttcctatcacctcgagaagtaattatcagttggtttggatttttggaccaccgttcagtcattttgggttgccgtgctcccaaaacattttaaatgaaagtattggcattcaaaaagacagcagacaaaatgaaagaaaatgagagcagaaagtaagcatttccagcctatctaatttctttagttttctatttgcctccagtgcagtccatttcctaatgtataccagcctactgtactatttaaaatgctcaatttcagcaccgatgg

SEQ ID NO: 9008 - DNA, 218 bp, Homo sapiens
  misc_feature (1)...(218): n = g, a, c or t
ccatcatcctnttcccctttgggttcatttgctgntttgccttgaggaagcgacgatgccccaactgtggagccaccttcgcttaaagggaacaccaggcccggctttcctacacccagctctntttttctaatgtaaatgttgtgtacaatagttttatttgattaagcttnaggactgttntgnaaagcgaggtgggaccgatgtggcacacgcca

SEQ ID NO: 9009 - DNA, 364 bp, Homo sapiens
  misc_feature (1)...(364): n = g, a, c or t
gtatatcttctttnatgaacatctctttaaaagttttgtaccatttttaaggtcaggttatttatttatcatcagttgtagcagttctttatgtattctggaaccaagtctattggattccaaatacggnattttctttgtatatatggtaaatagaatactttctcttttaagtcataagatatattttaagatattaaatgactaaaattatttaggtcataagttaaatatttttttcctgtggtggtattttttaatcccttctttccacctagtcactttttggaatatctgtagcaataatagtaggaacagtanatgtgcctttggagtgaaaataaatagccatttaaaacatagg

SEQ ID NO: 9010 - DNA, 597 bp, Homo sapiens
ctgggaagccacgagaatattgtgaacctgctgggggcgtgcacactgtcaggaccaatttacttgatttttgaatactgttgctatggtgatcttctcaactatctaagaagtaaaagagaaaaatttcacaggacttggacagagattttcaaggaacacaatttcagtttttaccccactttccaatcacatccaaattccagcatgcctggttcaagagaagttcagatacacccggactcggatcaaatctcagggcttcatgggaattcatttcactctgaagatgaaattgaatatgaaaaccaaaaaaggctggaagaagaggaggacttgaatgtgcttacatttgaagatcttctttgctttgcatatcaagttgccaaaggaatggaatttctggaatttaagtcgtgtgttcacagagacctggccgccaggaacgtgcttgtcacccacgggaaagtggtgaagatatgtgactttggattggctcgatatatcatgagtgattccaactatgttgtcaggggcaatgcccgtctgcctgtaaaatggatggcccccgaaagcctgtttgaaggcatctacacc

SEQ ID NO: 9011 - DNA, 599 bp, Homo sapiens
ccatagaggacgtggaggattcaatatgcgtggtggaaatttcagaggaggaggcaagttaattttgagtgttctgtatttagttcaggatcgaaacaagtgataattttatagtttggatgtagctgaagtttcttcctcattaatggtatactgtcacagtaactaaagtattcatgtgatttgatattaaatacacctaggttatgttaatggttagaattaaacatttcttttgtctttaaacaattatttttggagaaaaaggaacaatctagaggaatcctaagtcttctgtataagtagggtacaatatacaatgaaactaaaacagctcttgtcttttagcccctgggaatcgtggcggatataataggaggggcaacatgccacagagaggtggtggcggtggaggaagtggtggaatcggctatccataccctcgtgcccttgtttttcctggccgtggtagttactcaaacagagggaactacaacagaggtggaatgcccaacagagggaactacaaccagaacttcagaggacgaggaaacaatcgtggctacaaaaatcaatctcagggctacaaccagtggcag

SEQ ID NO: 9012 - DNA, 468 bp, Homo sapiens; identical to SEQ ID NO: 4911

SEQ ID NO: 9013 - DNA, 594 bp, Homo sapiens
ccatctattacactacaaagtagtataatgcaaataaatagaattctatccaggttaaaggttaatagcattagattagcacagtaaggtatgactaagtaattagaacagattttaaaatattttactacattaagaggctggagatatatgtgtgtgtgtgtgtgtgtgtgtgtaattagagatcccatgtcatcagaagcatatatttgacacagccagcctacagtggaatgcagtctcatagaacaataaagctggtcagtctaagtaacatcatgtttgagcagtttaaaacaatgactttcagcgatgaaaccaaaaattcagattttccagtgattcaaagtacttatttcctgcatttaaaaataacttcataaaacttgaaattgatgaagcacaaaccagccttagtttaggtaggggtataacagataaaataacttttaagtgttcatgtgcagatgatttgcttgaccccaccctttgcattttgtgttgaacttagaggtgtcttgctttttttaatatgtcaaataataaagaattaggaaatctgatactttttttttgactcttgctctgtcaccc

SEQ ID NO: 9014 - DNA, 599 bp, Homo sapiens
ctgcaatttgtcctttaaggatgcctcacaaggatattatgtccaggtagctagtccatttatatcggggaccagttgtccttttgttgtttgtggctgtttattaaatgtagtggcacaactttgttgtgaatatgtaccatcatttgctacaatctagacagatcatcctgtctacaaaaaatcattttctacatttctaagaccattatcagtttatctgctcctgctagaaaaggacatactttttgtcaatttacattaacaaaggctctgctactccccatttactcgctgcaatgaaaactggtaagccaagggtaaagcttaagtatcagggactatgaatttagggtagaagtgaaaataaccaaagtggaactaaatcccctattctggagtgcaactgagatcaagtaaacttcgctggactttcttcttaactataaaactattaaccagaaggtaaagtcacacaattttacctcccaacaaacttttaaaataaaaatttccaaaaaatttagatgtctaggttttgttatatcttaccaagagttacacagacataaatttgtatttaacttcagttaaacatc

SEQ ID NO: 9015 - DNA, 562 bp, Homo sapiens
  misc_feature (1)...(562): n = g, a, c or t
cctgtttgattgtagctatgttggtgtatctcgtgtacaagatggaaaagtgcttttgttgttctacctgatccagttgggggagcaggaatagggggtgcctgcctaacggcctctagcccatgtgcttatactgggatctgtcccgagggatctgcacctggttggcagtcattttgtggtggacgtggtaaatcgcgagtgttaccatgatgacgaggcccaagatgagccccaaaatcaggggcaaggtttcttccagttgctcccgctcatccactgggcatttatgctcttcactgaagacaaaatctgagataatgtcaaaaggttggatgtggaccgcagacaggatcatggtgaccgtcttctgcggatcactagaggccagtgaaatggtttgttgagcttgacactcataggacttcccagcgggggtgaccaaggcanagaggtggtgcgagttggctgtgtgcttcccagcactgactgcgtctttgaagtgggttttctccgaggagtcgtagacaaactgcactttgctcagcctccaagtcgcctc

SEQ ID NO: 9016 - DNA, 598 bp, Homo sapiens
tttttttttttttttaaggacaactttttattgctaccagaggcttttatcatcagtacacagttctgactgcaatacctttttcagactgcaaagggaactcaggatccagaagtcattaaaagaaacataaggctggggaggcagggggagtaagttctattagaaaatcctaatagcttaacaaaactagggtactaaattcagttataacatgttacagacttaaatcatagagctgccccaacatctagacagtctctcctactgattataaatgagtgaaaactatcagttagaaaaatctaatttaagttgttaatacatgtttctttggtgagcacctggatatatttatcacaaattcttttatacaaatgtcgaaaatgctttcaacaaacctaagtgtcctaattacatgccacttttaagcatcactttaaggtaaacaaaaatgaaaaccataattttaaattaaaatttgaaatgagacacaaaatcaacctggtaatatgagaactttttcttttgccatctctgattaatatgggacaattccaaagtacccttttcagactaattggaacttgagtcatgg

SEQ ID NO: 9017 - DNA, 528 bp, Homo sapiens
agataaagggttttgaacatgaaatgacaaaaacaacagcaagaagaaaattcttgtcctttttcattactatcagactcaaataaatgtcttggctcttacattacattcattcttcaaccattgtggtctggcttccacttccttcacttcaccaacatggctctgccaaaggaagcccgtgatctctaggccatcactttaattgatctctctacaacatttatcctggttgttaagccctccttacaacattcttctctctttgtttttatagctccatctctcctgcttctttaacttgataatgcatacttgatttttctatttgttatttcataaaccaattaatacacagataaaatgactgtatatcaaaccatgtttgtatagaaaaatggattttggatgcctctcatatgtaattagttctattaaacatattaattgtattgtttaatttgtcaggtttttgacagaattttgtttacaagtaataaaaattttatctccaatttccaaaaaaaa

SEQ ID NO: 9018 - DNA, 469 bp, Homo sapiens
  misc_feature (1)...(469): n = g, a, c or t
ctgcgttncatgtaacaaaagatgcaaacaaaatagattcaagttgttttgcagacagcacaatgatacaatattaggactacagaatctcagagtaaaccacaatgatttaaaggtaagatacacagaaataaaatgattttaacagaaaaatatgacattcctgaccttaggtctgggcacatgatgtctgacccctatagaggcaccttggctaaaatggaaatgacctagtgccatggctgacctcacttgtgcgttgctgagcccatatgtgaacaaatccccttgatacagcaccatggtaggcatgagaggagaagtgttttaactattctcttatgaattgtaaccaacccttattatctactgatggatggacagggggtggggtgatcatacaggatggcagacattccaagtactcttcaccccagtgtggacggaacagaatctggctacacggtgg

SEQ ID NO: 9019 - DNA, 327 bp, Homo sapiens
  misc_feature (1)...(327): n = g, a, c or t
gactacattcntcttattgctgcagtgaaaggngtgnntgaccatcgaatgaagtgctggcagaaatgggaagatgctcaaattactttgctcaaaaaacgtgaagctgaagcaaaaatgatggttgntaacaaaccanataaaatacagcaagctaaaaatgaaataagagagtgggaggcgaaagtgcaacaaggggaaagagattttgaacagatatctaaaacgantcgaaaagaagtgggaagatttgagaaagaacgagtgaangattttaaaaccgttatcatcaagnncttanaatnactagttcaaacacaacaacag

SEQ ID NO: 9020 - DNA, 138 bp, Homo sapiens
ctgcccaaaaggtgtcccatctcttgggtatcaatgtgaccgatttcaccagaggaatcctcaccccgcgcatcaaggtgggacgggattacgtccagaaggcgcagactaaagagcaggctgactttgccatcgagg

SEQ ID NO: 9021 - DNA, 556 bp, Homo sapiens
ccacctgtctgcaagagaggcggcccctgtgcttgcaacgcttacgtgttgatcccagtgtccttttccaaatgagtgctgtagctttagaagtggccctctatagaaagaagtcaaaagatgaggccccttctagaatctaggataacaagagtgttgacagtttgaggagtcgaattgagattcatcatcaaagagcaatgcagcgtcgttaaaataaaaactgtgccttttaaaaagaaaaatgcaaatatagagcaaatccctaaacttgaaccatttcctagtgccttgctagacaaacataaaggggcagggttgtggggaagggaacgtttttggtggtgtgtgcagttcctactggatgagtgtgtgtttcttaatgtctcatttcaagcaggagatgttgggtctggagcaagatctgagactgcgatgtcccccaagggtgacaggtcagatttatttcagtcagtgcaagtcacactccaaactaaaggctgggcagtgcgtttagtctgtggcctagaagacctcatcagcccccgagaggagg

SEQ ID NO: 9022 - DNA, 224 bp, Homo sapiens
ctgaacatctgtttttagcaccatgcctcccttcctccttcaacctcctgatatcactgtcgtctcctctgcaggtgctttggttttgcccttctggtactaagttactgtatcatatgctttctgtttcagattttatggtttaaggtaactgatgagatctacctctgacaaaaagagttggaatttttgtttctatttcctttgttttatgctaagatttt

SEQ ID NO: 9023 - DNA, 569 bp, Homo sapiens
ctgggagagctagactaagttggtcatgatgcagaagctactcaaatgcagtcggcttgtcctggctcttgccctcatcctggttctggaatcctcagttcaaggttatcctacgcagagagccaggtaccaatgggtgcgctgcaatccagacagtaattctgcaaactgccttgaagaaaaaggaccaatgttcgaactacttccaggtgaatccaacaagatcccccgtctgaggactgacctttttccaaagacgagaatccaggacttgaatcgtatcttcccactttctgaggactactctggatcaggcttcggctccggctccggctctggatcaggatctgggagtggcttcctaacggaaatggaacaggattaccaactagtagacgaaagtgatgctttccatgacaaccttaggtctcttgacaggaatctgccctcagacagccaggacttgggtcaacatggattagaagaggattttatgttataaaagaggattttcccaccttgacaccaggcaatgtagttagcatattttatgtaccatggttatatga

SEQ ID NO: 9024 - DNA, 356 bp, Homo sapiens
  misc_feature (1)...(356): n = g, a, c or t
ctgatgaaggcatctgatgccttcatctgttcagtcatctccaaaaacagtaaaaataaccactttttgttgggcaatatgaaatttttaaaggagtagaataccaaatgatagaaacagactgcctgaattgagaattttgattttttaaagtgtgtttctttctaaattgctgttccttaatttgattaatttaattcatgtattatgattaaatctgaggcagatgagcttacaagtattgaaataattactaattaatcacaaatgtgaagttatgcatgatgtaaaaaatacaaacattctaattaaaggctttgcaacacanaaaaaaaaaaaaaaaaaaaagggggggg

SEQ ID NO: 9025 - DNA, 564 bp, Homo sapiens
ctgggaagccacgagaatattgtgaacctgctgggggcgtgcacactgtcaggaccaatttacttgatttttgaatactgttgctatggtgatcttctcaactatctaagaagtaaaagagaaaaatttcacaggacttggacagagattttcaaggaacacaatttcagtttttaccccactttccaatcacatccaaattccagcatgcctggttcaagagaagttcagatacatccggactcggatcaaatctcagggcttcatgggaattcatttcactctgaagatgaaattgaatatgaaaaccaaaaaaggctggaagaagaggaggacttgaatgtgcttacatttgaagatcttctttgctttgcatatcaagttgccaaaggaatggaatttctggaatttaagtcgtgtgttcacagagacctggccgccaggaacgtgcttgtcacccacgggaaagtggtgaagatatgtgactttggattggctcgagatatcatgagtgattccaactatgttgtcaggggcaatgcccgtctgcctgtaaaatggatg

SEQ ID NO: 9026 - DNA, 592 bp, Homo sapiens
ccacagtcttatatttttaatttgaatttactatctcctaagctagttgttttcaactatggagttttataaaaaataaaatgcctaggccctactgctgaatctctttacttcatatatttggtatattatgtctcataattgttatatctcaatttatttttctatataaaaattgtgttcctccatttttataaatcagatttttttaatgcaaacttaattattatccttagagacaacttgcctatttttttattttattttttggaatggctttattatctttggcatgctacagaagcaaccacatttctttactggttgcattataattatgcacccctcatctgacctgtcacatttgagggttaccagttataaattaaaaacagccactctaagtctctgtcatctacagatttttttttttcactctgaggcttgtgtgaatgccctggtataagctacaggccagattttgtgtcttcagccaaggacagtttcaggcttgtgtgaaggccctgctataagctacaggccagattttgtgtcttcaaccaagaaagacagtctcagagcttcatggaga

SEQ ID NO: 9027 - DNA, 328 bp, Homo sapiens
ctgtagagtgggcttatcatctttcaacacgcaggacaggtacagattcttttccttgaggcccaaggccacaggtattttgtcattactttcttctccttgtacaaaggacatggagaacaccacttgttgctccatatcctgtccctggaggtggagagctttcagttcatatggaccagacatcaccaagcttttttgctgtgagtcccggagcgtgcagttcagtgatcgtacaggtgcatcgtgcacataagcctcgttatcccatgtgtcaaagaagataggttctgaaatgtggagcacatgttgtttaggtataaaatca

SEQ ID NO: 9028 - DNA, 598 bp, Homo sapiens
  misc_feature (1)...(598): n = g, a, c or t
aaaagtgtgacgagaacatcctgtggctggactacaagaacatctgcaaggtggtggaagtgggcagcaagatctacgtggatgatgggcttatttctctccaggtgaagcagaaaggtgccgacttcctggtgacggaggtggaaaatggtggctccttgggcagcaagaagggtgtgaaccttcctggggctgctgtggacttgcctgctgtgtcggagaaggacatccaggatctgaagtttggggtcgagcaggatgttgatatggtgtttgcgtcattcatccgcaaggcatctgatgtccatgaagttaggaaggtcctgggagagaagggaaagaacatcaagattatcagcaaaatcgagaatcatgagggggttcggaggtttgatgaaatcctggaggccagtgatgggatcatggtggctcgtggtgatctaggcattgagattcctgcagagaaggtcttccttgctcagaagatgatgattggacggtgcaaccgagctgggaagcctgtcatctgtgctactcagatgctggagagcatgatcaagaagccccgccccactcnggctgaaggcagtgatgtgga

SEQ ID NO: 9029 - DNA, 576 bp, Homo sapiens
ctgaaaatcttttagtaaaagctttaaagatgagcccatgaattcactttaaatttcaccagttaaattaggtcaaatggaaggaactcaaatgagtattgcccaatcagagcccattatttgtaagtcatcagtaaccttaaaactccacttagacctaattattgaaaacttgcatataatgaagtgaaagaatttccattcatcaacctctcaatcccaggttttcaaagaaaaacctatctaaggaatacttaccaaaatcagataagaaaatttaaacctgcatagttatcagatttgttccactacaaccagtctgcatacagttacacatcaattcgttctgtatacactctagaactgaacagaacaaagtttagcatagaaaagctgtaagaaacaggttcctaattacggaagttgcaaagttcaaaagggtatgaaaaaaactaatgtaaattcgatacttccttcgtttcaaagaaatagactttctgtaaaaatatatacaatttttacaaatacatttacaagctgtcttaagaattgaggatatccatattcataactaat

SEQ ID NO: 9030 - DNA, 597 bp, Homo sapiens
ctgtggctgtctgtcagagaagcacatttttctgcagataattagaatggcttcccccatctctcacggactgtcccaagtctagaaaagaattgagttcctcttctattagtcaaataaaagggaagagaatgtttgtcttcctttcctttctgtagtgttaagaaaataaacgaacttaatgattctaaattatcagtgagcttaacactgtactatagaccaaagattaccttttcaaaaagtcctttgaggtgaaatattttgtatacgtaatacatagatgcacatataaacacacacatatagaatctcaatattttaacacttctttgggtagttgtactaactcactaaccctgaggaaaaagttaagaaattgaaagtgttttcttcaaaagttgagatttaacaataaaaggtgttactttgataactaaaaggaactttattatcctcttcctaaaataaaccaatgcctattctgaaaatggcacttgcaattacaatttgccattatcaaagctaccactgaggtagaggcattatctaaaacaaataccacttatcatttattggcagttacctcgagaggga

SEQ ID NO: 9031 - DNA, 581 bp, Homo sapiens
ctgggaagccacgagaatattgtgaacctgctgggggcgtgcacactgtcaggaccaatttacttgatttttgaatactgttgctatggtgatcttctcaactatctaagaagtaaaagagaaaaatttcacaggacttggacagagattttcaaggaacacaatttcagtttttaccccactttccaatcacatccaaattccagcatgcctggttcaagagaagttcagatacacccggactcggatcaaatctcagggcttcatgggaattcatttcactctgaagatgaaattgaatatgaaaaccaaaaaaggctggaagaagaggaggacttgaatgtgcttacatttgaagatcttctttgctttgcatatcaagttgccaaaggaatggaatttctggaatttaagtcggcccgtctgcctgtaaaatggatggcccccgaaagcctgtttgaaggcatctacaccattaagagtgatgtctggtcatatggaatattactgtgggaaatcttctcacttggtgtgaatccttaccctggcattccggttgacgctaacttctacaaactgat

SEQ ID NO: 9032 - DNA, 587 bp, Homo sapiens
ccagttttcatacagtctcggggttttaaaactttgaaatcaaggacacgacgtctccagtctacctccgagagattagctgaaacacagaatatagcgccatcattcgtgaaggggtttcttttgcgggacagaggatcagatgttgagagtttggacaaactcatgaaaaccaaaaatatacctgaagctcaccaagatgcatttaaaactggttttgcggaaggttttctgaaagctcaagcactcacacaaaaaaccaatgattccctaaggcgaacccgtctgattctcttcgttctgctgctattcggcatttatggacttctaaaaaacccatttttatctgtccgcttccggacaacaacagggcttgattctgcagtagatcctgtccagatgaaaaatgtcacctttgaacatgttaaaggggtggaggaagctaaacaagaattacaggaagttgttgaattcttgaaaaatccacaaaaatttactattcttggaggtaaacttccaaaaggaattcttttagttggacccccagggactggaaagacacttcttgcccgagctgtggcgggaga

SEQ ID NO: 9033 - DNA, 574 bp, Homo sapiens
cctcaatgacaagatgtttgagcatgacttccgttggactgatggcagcacactggtaagatgcccttgaaaatgatgtcaagttctaccttctggaaatttggtactgtgcactgattgtgcattacagagggtgcattagactggaggcaagttaaatgacttgctcaaggtcactcagtgaaacagagaagggttagaagagttccaagctacctgatccaacatccagtcctctcttcaatagttgtggttctcttcaaaagaggagtgtaccagatttctatcaaaccagaaaaccagacaattagtagaattgccttgggtctgtctttcagatggttatctttgctttttctagcttcagagcaaaaagagaagaataaaatgtagcagaaaaagtcattttaaaaaaatacctttccgtcttaaataattcactggaaatccgctataaggcatgactcatttccaagcaaaaatatccatttatttttatcttaaagaagactgttgatatgatcttgtgaatttctgccaactaattacatatttcaacttgttttctattttt

SEQ ID NO: 9034 - DNA, 449 bp, Homo sapiens; identical to SEQ ID NO: 8473

SEQ ID NO: 9035 - DNA, 109 bp, Homo sapiens
  misc_feature (1)...(109): n = g, a, c or t
ccagtggaatgatgttccctgcaattaccatctcacctatacgtgcaagaaaggaacagttgcttgcggccagccccctgttgtagaaaatgccnaganctttggaaag

SEQ ID NO: 9036 - DNA, 538 bp, Homo sapiens
ctggcaatgacaagactgggagtatcaaactaggattgttagttcaattaaaatttcagataaacaataatgtacttatactaaaaaattatttgttgtttatctgaaatgaaaatttaactgggtacccaattgtttgtttgtttaatctaaaaaccctgattgaaatttatctaataaaacatcatttaatatctaaaataaaataaatttactataacatctttataactattcaatcaatgattcatcttctatttttccaaattcttgcacaaatatttgatgcttaaataaatacataaataataaataggttaataagttacacttgaaaataatttatgttatgatgaaaaaacttaaagtgcttccacatgtcctcacaacatcactgtgaggtaagatggtggctaatactttttccacttagaaataaaggagaaaccaaggcacagtggaacaaggacttgtggatcctggctagcagagtagggttgccagatttaacagaaaaaaatccaggatttccagctaa

SEQ ID NO: 9037 - DNA, 521 bp, Homo sapiens
ccatcggtgctgaaattgagcattttaaatagtacagtaggctggtatacattaggaaatggactgcactggaggcaaatagaaaactaaagaaattagataggctggaaatgcttactttctgctctcattttctttcattttgtctgctgtctttttgaatgccaatactttcatttaaaatgttttgggagcacggcaacccaaaatgactgaacggtggtccaaaaatccaaaccaactgataattacttctcgaggtgataggaaaggcacaggaagttaggactttggctgaaatgatgaaaacacatgttcgccattttagggatcagcgcctcgactcctgccacctccggctccaacgatgatcatgtttggatgtatttattgaattgtcctttgctgatgaggaatttttaaagtatttcatagaataagtcctttggtatgcagatgctacatggaaggaaagaaagaaaaaaagaaaacacacaatattacttgctccatgccctaaa

SEQ ID NO: 9038 - DNA, 525 bp, Homo sapiens
ccaaataactcccaaatgaaacactcaacccaaggatgttttcagcccactgttagtgaagctgggtgcagaatgcaaagcctctaaaaggagaggatacaaagtcaggtgagtaggggccattggcaatgctcagagccagccagactccaaacagggagcccaagtggtttttttctgggacactctacttgaattattgtttaattagtcaaccatagatcttcaaaagagaacaattagttaacatgataaaaagtgactgcattctttggactgtatcataattatagtaagcaaattctgacagttttaatgaaaatagcctccaccattttgcaggtatgaagataacttaattatccacagggcttttaatgtctgctggacaatacatgaatgataagctataaatgacattgttttatgatataaaaatactagtttttttcatttattatttctataggcattcactgtttgagtcaaggttaggcttgttaagtgattaaaggcaattttatt

SEQ ID NO: 9039 - DNA, 371 bp, Homo sapiens
cctcgagtgcgatatggcaaagccaaagctcccatccaagacatctggtaccacgaggatcggattagagcgtgagtgctcagccctgtagtggacaggaggcaacagaacttcagaagggaaggtttcggtagcagtctgggaattcaaacatgaaattgagtcaggggtttgccctgtggagaaggcttatctagccaaattagggaggcagcaccccttcctcatagtgaaactgaagttctgaaaagtggaatctggagcccagcaaccgaaagatcattgcaattatagccgcatgtttctgggcatctgctttgggccaggcactgtactaagctctttgcaagcattatctcattctctaaagg

SEQ ID NO: 9040 - DNA, 590 bp, Homo sapiens
  misc_feature (1)...(590): n = g, a, c or t
gccacactctacttctgcttctgccacctatggggtcgaggcaggtgtggtgccttggctaagtccacagacttctgagaggcccacgctttcttcttctccagaaataaaccctgaaactcaagcagctttaatcagagggcaggattccacgatagcagcatcagaacagcaagtggcagcgagaattcttgattccaatgatcaggcaacagtaaaccctgtggaatttaatactgaggttgcaacaccaccattttcccttctggagacttctaatgaaacagatttcctgattggcattaatgaagagtcagtggaaggcacggcaatctatttaccaggacctgatcgctgcaaaatgaacccgtgccttaacggaggcacctgttatcctactgaaacttcctacgtatgcacctgtgtgccaggatacagcggagaccagtgtgaacttgattttgatgaatgtcactctaatccctgtcgtaatggagccacttgngttgatggttttaacacattcaggtgcctctgccttccaagntatgttggtgcactttgtgagcaagataccgagacatgtgact

SEQ ID NO: 9041 - DNA, 334 bp, Homo sapiens
ccagcatcctcttggatctgcagttaggctcaacacattccagccttagcacaatcttctttgtggtcttagccttcttccggaaaattggctttgtctgcccaccatagccactctgcttccgatcatagcgcctccttccctgggcatacaaagaatccttgcccttcttatactgtgtcactttgtgaggctgatgcttgccacacttcttacagaaggttcttcgggttttaggtacgttgaccatctttgcagcagggctgttttgtctatatgatgaaaacgagaaacagcgcccgacacctggcccttcgcagctctcgcctttcgc

SEQ ID NO: 9042 - DNA, 597 bp, Homo sapiens
  misc_feature (1)...(597): n = g, a, c or t
ccatcggtgctgaaattgagcattttaaatagtacagtaggctggtatacattaggaaatggactgcactggaggcaaatagaaaactaaagaaattagataggctggaaatgcttactttctgctntcatttnctttcattttgnctgctgtctttttgaatgccaatactttcatttaaaatgttttgggagcacggcaacccaaaatgactgaacggtggtccaaaaatccaaaccaactgataattacttctcgaggtgataggaaaggcacaggaagttaggactttggctgaaatgatgaaaacacatgttcgccattttagggatcagcgcctcgactcctgccacctccggctccaacgatgatcatgtttggatgtatttattgaattgtcctttgctgatgaggaatttttaaagtatttcatagaataagtcctttggtatgcanatgctacatggaaggaaagaaagaaaaaaagaaaacacacaatattacttgctccataccctaaactgccgataccacagncgtaaaatgaaggtgtctantagttgttatagcacggtagtccattctttctaaggacca

SEQ ID NO: 9043 - DNA, 337 bp, Homo sapiens
  misc_feature (1)...(337): n = g, a, c or t
aaaagattgatcgccgttctggtaaaaagctggaagatggccctaaattcttgaagtctggtgatgctgccattgttgatatggttcctggcaagcccatgtgtgttgagagcttntcanactatccacctttgggtcgctttgctgttcgtgatatgagacagacagttgcggtgggtgtcatcaaagcagtggacaagaaggctgctggagctggcaaggtcaccaagtctgcccagaaagctcagaaggctaaatgaatattatccctaatacctgccaccccactcttaatcagtggtggaagaacggtctcagaactgtttgtttcaattgg

SEQ ID NO: 9044 - DNA, 265 bp, Homo sapiens
  misc_feature (1)...(265): n = g, a, c or t
ccttcaaagaattcccatccagtccaagtggggaggatcatactagaagactaccatgatcatggtttactgcgcgtccgaatggtcaaccttnaagtggaagattctggactgtatcagtgtgtgatctaccagcctcccaaggagcctcacatgctgttcgatcgcatccgcttggtggtgaccaagggtttttcagggacccctggctccaatgagaattctacccagaaggtgtataagattcctcctaccaccactaagg

SEQ ID NO: 9045 - DNA, 300 bp, Homo sapiens
ctgccacatccctgggcttacggtgcagcaggtgcttttttcaagacaggaatcaaaatgttaggaacacggcagaaaggggacacctggagaccaaacgcaggatgaggagttctgcagaggtcacagggaagtcacagaacagtaatacgctagcaggggcatggggcgtgaagaacagaagaagagaggaagcgtttccaagcctccagagaagaaatcaaggccaaccaaagcttcccgggtcacagaaccaattcttttaccaggcagtaccactgctgtcatttcagcttctgg

SEQ ID NO: 9046 - DNA, 518 bp, Homo sapiens
  misc_feature (1)...(518): n = g, a, c or t
ccatcttaagttaaaggccctttatcataaaatatatggttttaaattttactcaaattgaatttataatccctatgacttccctacatntacataacaaaagngtgtagtaaaattagcaaatactaaactatattgataatttatcattcttagtttgtggtttttagaaacagtacacgcacctaatatatgtcgattccttggcttattagttgcagtgtacaatgcaacaaaatacaaaatacatgcttggtgaacattcgttcatatctacaagacggcagctagagattaggtttcaatactgaccatttactatcctacaagcaattagcattacatcataatatgccatcaaggcaactttttttatactgaaaaaatcaaaataaaaaccgntatttgtaaacttttatacgaaatgtaactcttcaagtggaaataaaaaataaaatttgnctatttactattgaatacacataggatttcaattttcattataccgagaaaaaagc

SEQ ID NO: 9047 - DNA, 207 bp, Homo sapiens
ctgtattactactgtttctatatttatgattaattactagcagtacaactcccagaaggaaggagatggatccaacagcgatgtaagcaatccccaaaaatggattttttcctcccatccatgaaatagtgctcaagatcatccgttttcgtccatcaaaataatgtacagggtaattgtatgtgacattcaaagagtatcggccag

SEQ ID NO: 9048 - DNA, 597 bp, Homo sapiens
  misc_feature (1)...(597): n = g, a, c or t
ccttcattagaataaagtatatcttaactacattttgcaaagaaatgaagcaatggttgcacaaccagtcagggccaagttagtaacatacaactcagccatcagcccacctctccttcaaactaaactaatctaaatgtatttttcagaaaatttcctccatactccatgtatgtgttacatacatccaatcatatccatattttggatcatttttttctatattcatcagattattggttaaaatgcacagcaagtagaaatgatccatttcaaaattcttaatatctagcgttctctgtaaaacaaaagctgacaacagttttattgtactcctattaaatgtaggtgcatgttcattaggacatctgagctatttttaggaccttcagaaactggtgtgattcactttggccctctgagatagaaatgccatcttagtatttactgtgactacatacctcttttgttaaaacttgaccctgagttttgagtgctggaatataaactgtaaaatggaaaacactccaaaatacattagctaatattggtgtctctacaatactgngctttttctctccattaacataatgcacc

SEQ ID NO: 9049 - DNA, 596 bp, Homo sapiens
  misc_feature (1)...(596): n = g, a, c or t
ctgcacatggattggntaacataatatatactgctatataatcttttaagggctaatatttgtagataatttaaaagcatgtcaatttcctctaagatttgattatttaacctgcacaaaggccaatcttcagttatcaatgacaagaaaactctagggctgccaaaataacttcattttagaccccagagttagtgttaggctggtaatgtttctaatttgggaataatgagactagaaagctaggagggccccctccaaatttctcccttgtattaggctgaagtagaacataacgtggcttaaagcataaacttaaagcatatgctttgagttttaaaaatgttaacctgtaattaattattagagtattatccatagtctactatgatagtcagttaatattctctaaatcagattatattcatttgaaaatgcatctgcatatttgcaaatgtgttattacacaagatcttacctatgtcaatttaaagaggttaaagatgcaggaagcccccactaaaatgtaaacacatttgtacggttttcagaatgtttggactcattctttcccattgacagagcagtangtttta

SEQ ID NO: 9050 - DNA, 506 bp, Homo sapiens
tttttatgcagtgcattcattgtaaactataaataacatttgtattaaaaagaaagctgggtaatacaaaaataggagagactctgaggagcaggcaatctgttgaggctcagtatatcttatttgctttgtagtctgctgtcattcctttcaaagagcacacagcacatgaggcatagtaatcatctgtcttgttaacctctctaatttagaaatctgttgttcgtaaaactggaccaattatcacaaactatcatttgcataattaaccgcaagtctgttacaaagcattttgttagtggtatcaacaaatgcaggaggatggacatttataaaaaatgggttttgttaagcttgccaactccttagatatcatggactatactgccatttcacgatttaattagatatttaatgcctcaagtaaaagactgatcaatggaagcaagcaaaactaaattattttctaggtgctgtaatatttcatttgataaggtaacaaaagg

SEQ ID NO: 9051 - DNA, 390 bp, Homo sapiens
ctgtgcccaggaaatggctaaattcatttcaaaaaacaaacacgtgagcctgtgcatcttcactgcccgcatctatgatgatcaaggaagatgtcaggaggggctgcgcaccctggccgaggctggggccaaaatttcaataatgacatacagtgaatttaagcactgctgggacacctttgtggaccaccagggatgtcccttccagccctgggatggactagatgagcacagccaagacctgagtgggaggctgcgggccattctccagaatcaggaaaactgaaggatgggcctcagtctctaaggaaggcagagacctgggttgagcctcagaataaaagatcttcttccaagaaatgcaaacaggctgttcaccaccatctccag

SEQ ID NO: 9052 - DNA, 225 bp, Homo sapiens
  misc_feature (1)...(225): n = g, a, c or t
aaaatttcatcactaaaatgatctacaggtctatggaaaaatgtgtaancacataaaatacacaaacctatttttttaaaaatgagatacttaaaatttctttagcataccaacaaaaaatgaangtagcattgccattttactacagatgtgcngacattccaaagtccaccnattgttcgtatatatnggctcaacangtnatatttnagaatatactgctgg

SEQ ID NO: 9053 - DNA, 134 bp, Homo sapiens
  misc_feature (1)...(134): n = g, a, c or t
ngnccatggaaacatagtatnaatcatttgtgtatctaaatataaagacatataaataagtaaggaagtatagtcccgtggaaccaccatctgttactggcagaaactttgttatgcngnaaataactggattt

SEQ ID NO: 9054 - DNA, 256 bp, Homo sapiens
  misc_feature (1)...(256): n = g, a, c or t
ccaaggacttgacaaagacctgtgaatttatcgttcactccgctcctcagaaggggaagtttactcccagtcccgtggacttcacgattacacctgaaaccttacagaacgtcaaagagagagctttgcttcccaaatttctccttcgangacatcncaacttaancaaactgtntcatcacggcagccactaacgnggagagctggtggtggagagctcggaagccgccatcagaagcgtggagctgcanacctn

SEQ ID NO: 9055 - DNA, 269 bp, Homo sapiens
  misc_feature (1)...(269): n = g, a, c or t
aaatatgacctctgttccctgaagaaaaatcatatcaaagactctggctacgaatcccagcgggaactgtgaggcaaacatggtgaggaaccagggggcagcgtagaggctggggccgatctcgtgctcctccaggngattgtagaggtctctgtggtantcatgaagcaacctcnagagcttggtacatctggatcttgtaaaataatcatgtctggccgatactgtttccgcagccccatgtcaaacatcagaaacttgagcatttt

SEQ ID NO: 9056 - DNA, 363 bp, Homo sapiens
  misc_feature (1)...(363): n = g, a, c or t
aaatatgctgcatagacnnctggaccatattttgtagccattaaattttcaaaagactgggtccactgtaatacttcctccaaagtaaggtttgaagggggcctcttagattcatctctgcacatcttacaaatccaacaattccgcctgctcattttncaaancttnaaataaacaatgatcatttttttctcatgttggtggnataatatgtggaaacattccattgacaaatatatcctgtcgagcagtccaccatgctaaatttgatctcctctttgttatgatccgtttgaaatcaggttctgaaattttgtgagacacccagcattttatttttcccanagnaaaagaattttactg

SEQ ID NO: 9057 - DNA, 196 bp, Homo sapiens
  misc_feature (1)...(196): n = g, a, c or t
cntggccgaggnaaatatcacaagtaggtgggtaagtgtcatctggcatcttctttctgtagccaggtaactcttagatcttattcatcagcctgctgaacagntcctttttnagagacatagataccatccaaaaatttcctgatatccttgcttttaactgttgnggctcgctnaaatcnanancccttgaatg

SEQ ID NO: 9058 - DNA, 102 bp, Homo sapiens
  misc_feature (1)...(102): n = g, a, c or t
aaaaaaggttctgaaatnnncatacaagcatgctggacaatcccacccttttcccctccccatttcccctttttttgttcaaaccatggtaagagttctgat

SEQ ID NO: 9059 - DNA, 593 bp, Homo sapiens
  misc_feature (1)...(593): n = g, a, c or t
ttggcgtaatcatggtcatagctgnttcctgtgtgaaattgttatccgctcacaattccacacaacatacgagccggaagcataaagtgtaaagcctggggtgcctaatgagtgagctaactcacattaattgcgttgcgctcactgcccgctttccagtcgggaaacctgtcgtgccagctgcattaatgaatcggccaacgcgcggggagaggcggtttgcgtattgggcgctcttccgcttcctcgctcactgactcgctgcgctcggtcgttcggctgcggcgagcggtatcagctcactcaaaggcggtaatacggttatccacagaatcaggggataacgcaggaaagaacatgtgagcaaaaggccagcaaaaggccaggaaccgtaaaaaggccgcgttgctggcgtttttccatangctccgcccccctgacgagcatcacaaaaatcgacgctcaagtcagaggnggcgaaacccgacaggactataaagataccagcgtttccccctggaanctccctcgtgcgctctcctgttccgaccttgccgnttaccgganaccttgtccgctttctcctttgggaa

SEQ ID NO: 9060 - DNA, 249 bp, Homo sapiens
  misc_feature (1)...(249): n = g, a, c or t
aaattgacctcctcagntaactcagcagaacccagcatgtcagcagtaaattggtcaatatgagcaactggcttggttccaattgtcttacaaatgaattcaatgtcttctctttcaatatccttaatcaccatgatcttcattttattcagaaagtgtaatgcaagatcactaagagcatctcttagaatagatttctgtatgagaaggacattacatcctgtttttttaatttgcttcactaaattt

SEQ ID NO: 9061 - DNA, 373 bp, Homo sapiens; identical to SEQ ID NO: 4043

SEQ ID NO: 9062 - DNA, 209 bp, Homo sapiens
  misc_feature (1)...(209): n = g, a, c or t
ttttttttgactcaaaaagtnacatttattcaaagaaaaaaaangacaagatgnccatcccttggctcccttccctcccccctcctgctgctcctcancccccagagattgagccctggctggggctgggtggcaggacagcccctcacatgaggtcagnancattgagggggcntttcctcaatggaggtgnttgnataaggtctcaa

SEQ ID NO: 9063 - DNA, 117 bp, Homo sapiens
cctactgctgagttcttatttatttaattgcttattgtcagtctcttccccacagaatggaagttccatcaaagtagagattttgttctctcttgttcaggatctgagtctccaagg

SEQ ID NO: 9064 - DNA, 434 bp, Homo sapiens
  misc_feature (1)...(434): n = g, a, c or t
aaacataaaagatattcagagttttgggtcaactgcatctttctggagagtttagtttcttgttaagncaatttgtgtattttcattgagcatacatccttaacaaggtttcatacatgctggcactttgagggacagncaagggacattctgaaanaactcccaatngactggggatcaggagattgaatntcaaattatattttcgcccattaatctgactctgtaaacttgaaaaagncatttcctttctctgggctatgtggaagttcctttttttataaatgacaaatagccttatcatggaatcatagaanattaactttagaggtggtttagagcccatcctcattttncaggcccaaagaaatgaantgagtttngtcagtcaatacgatagctcctcctggggaaaaaaaaacaaaaaagaagtg

SEQ ID NO: 9065 - DNA, 354 bp, Homo sapiens
  misc_feature (1)...(354): n = g, a, c or t
ccaccctcactgtgcaccccgtggatgttctgcgcacccgctttgcagctcagggtgagcccaaggtacggagatacaagggcctcatggactgtgccaagcaggtgctgcaaaaggaaggcgccctgggcttcttcaagggcctgtcccccanttgctgaaggctgccctctccacaggcttcatgttcttctcgtatgaattcttctgtaatgtcttccactgcatgaacaggacagccagccagcgctgagcgcaggaaggaccccaggtcttccctggaggcagcctcctgaaggaaggaagattcagtctccactgagaggtgccgtctggcccttccctgcaggccag

SEQ ID NO: 9066 - DNA, 136 bp, Homo sapiens
  misc_feature (1)...(136): n = g, a, c or t
tggacctgaccnccgtntgatggacctgaccgctgatganggacctgatcgcngnntgatggacctgancgactgtatgangngacctgacccccgtntgagggacctnacccgttgnntgatggacctgaccgcc

SEQ ID NO: 9067 - DNA, 472 bp, Homo sapiens
  misc_feature (1)...(472): n = g, a, c or t
aaaaggtaactttttaccaattttttgatcttcattagctggagtcaatgagtccaaggctggaatacatcgaaggagggcacaaccccctcccaaaacaatgccttcttcaacagcagctcttgtagcattaanggcatctgnaactctgnctttcttttcattcacttncaacatcacttgtcccaccaaccttcagcacagccactccatctgaaagttttgcaagccgttcattcagnttttccttttcatattcactagttgtgacatctaacngctcaatgatttcttgaatacgnttttcaatttgagccttgtcacctttncctttnaagagcatggcatcgtctttggtcacaatgacctctccaacttttcctaagtcatgaggctgaacgtctncaagattcagggncaatccctcttctccaaacactgcaccaccagtagcaatagccatatcttntaa

SEQ ID NO: 9068 - DNA, 112 bp, Homo sapiens
  misc_feature (1)...(112): n = g, a, c or t
ccgaggtaaaaaagagcaacagtggggaagcggctcccctcccccaagncatnntggctggcacactgtctgagcatcaccctggntttcaaagcgcgtcagctncaagacg

SEQ ID NO: 9069 - DNA, 306 bp, Homo sapiens
  misc_feature (1)...(306): n = g, a, c or t
tgatcctgnggatgggaaattttttgatcatgcggcacatcttgggggagctctttttggaatatggtatgttacttacggtcatgaactgatttggaagaacagggagccgctngtgaaaatctggcatgaaataaggactaatggccccaaaaaaggagggggttctaagnaaaactgggattggacantagnggtgcatctggtccttgccgcctgagagccccaggagacatcggctagagngaccatggctatgctcccgtctggaangatgccagcatntggcctcccactgnttttcag

SEQ ID NO: 9070 - DNA, 231 bp, Homo sapiens
  misc_feature (1)...(231): n = g, a, c or t
ctgccaaccctgtctacggcaggnatgaccagtataagactccaatgganaacattgggctacaggactcactgctgtcacganttgacttgctcttcatcatgctggatnagatggatcctgagcaggancggnagatctcanaccatgtccttcggatgcnccgctacagagcacctggggagcaggatggcgatgctatgcccttgggtagtgctgtgnatntcctgg

SEQ ID NO: 9071 - DNA, 299 bp, Homo sapiens
  misc_feature (1)...(299): n = g, a, c or t
ncnnggccgangtcctcaatcacaactttgnnagcagcngaaccggagggagccgcantgtacgccacaccactccttttagctctgtctacgttatctgggaaagggaagaaagcatcanagctgatagaaacttcagacaggttctnaacccattccttcttctctgcctcagtgagnnactgagggactncctcaaacagngccttccactttatcaaannttgatcctcgncaatggntccagtcacatattgatcgatggcatnggaganttctgctctcttcactccngnttt

SEQ ID NO: 9072 - DNA, 287 bp, Homo sapiens
  misc_feature (1)...(287): n = g, a, c or t
gcttactggntcccgaaaatagacaccttcntgagtcagacccctatgggnaccggcctttctcaaatatnagtnagcaccctcaatcccactgctaaacgacnttttggtcctcgctctgccactatgactccaagtattttntcccactggaacaacacantgtttgtaggagccactgattcnncgtgccatggcgcaatgatgntggaacttgctcgtgcttagacangaaactcctttccttanagactgtttcagactccangccagatttgcactccagc

SEQ ID NO: 9073 - DNA, 402 bp, Homo sapiens
  misc_feature (1)...(402): n = g, a, c or t
ccaccacacccaattccttgctggtatcatggcagccgccacgtgccaggattaccggctacatcatcaagtatgagaagcctgggtctcctcccagagaagtggnccctcggccccgccctggtgtcacagaggctactattactggnctggaaccgggaaccgaatnnacaatttatgtcatttgccctgaagaataatcagaagagcgagccccttgattggaaggaaaaagacagacgagcttccccaactggtaacccttccacaccccaatttttcatggaccacagatctnggatgttccttccacagttcaaaagacccctttcgtcacccaccctgngtatgacacttggaaatggtattcagcttccttggcactttttggncagcatccca

SEQ ID NO: 9074 - DNA, 554 bp, Homo sapiens
  misc_feature (1)...(554): n = g, a, c or t
ccaaacccccgtctctacaaaaaaatacaaaaatcagctaggcgtggtggtgcgcgcctgtactcccagctacttaggaggctgaggtgggagagtcactggagcctgggaggtcgaggctgcagngcaagattgagaattgcaggattgcactgcaatccagcctgtgctacagagtgagatcctgtctcgaaaaaaaaaataaaaaaataaaangggcctatcaatgcnacgttcctgcaaggcattgataatataaatgcaaaagccaccgcaaccaaaaaggctataatgctngcctgaatctagtacataagcaggataatgacaatcactttntgnttataaatttgtagatgtcttattatttcagtcagcatgaggactgcattnatatttgngggtggcagctctcaaanttatttatccatagnccagatttgttttgttgcatttgctctnaaaatgcattgttgtatactccatcacagaaggngtcaaaatactcctgctgcctttnnaaaatgttgcaaaaccctaaacctgtanttttc

SEQ ID NO: 9075 - DNA, 240 bp, Homo sapiens
  misc_feature (1)...(240): n = g, a, c or t
cctcgccagcctcagtcaaatgtaacgttcctaggccaagccacgaattgcccaactgggtggtccggctgccctgctatctcacttgtttgtgngcttattgtcaactctacctatgaggagtgagctcctaaaagcaganatttgggcagcgcaggnngctcacacctgtaatcccancnctttgggaggatgaggcggggcggatcacctgagctcaggagttcaanaccagcctgg

SEQ ID NO: 9076 - DNA, 194 bp, Homo sapiens
  misc_feature (1)...(194): n = g, a, c or t
tttggggctcccagnggttccctaaatttgagggatggaggaagacttcccttgccccaccccaagcctnccgancctggtggatnggtccctgtccccacncaacctggtggcacgggtggggcttcccgngctaataacccccctttttccttcttgtnngaccngctcccctcaaaagcttcncgccaaca

SEQ ID NO: 9077 - DNA, 80 bp, Homo sapiens
  misc_feature (1)...(80): n = g, a, c or t
ntatacagcacttatatcttttannccacaaccgatattatttaaatgatatgacancatntaatncaaccatttctccn

SEQ ID NO: 9078 - DNA, 345 bp, Homo sapiens
  misc_feature (1)...(345): n = g, a, c or t
ctgctgcacatgatgcaggaatcactatcttctctgttggtgtggcttgggcacctctggatgacctgaaagatatggcttctaaaccgaaggagtctcatgctttcttcacaagagagttcacaggattagaaccaattgtttctgatgtcatcagaggcatttgtagagatttcttagaatcccagcaataatggtaacattttgacaactgaaagaataagtacaaggggatccagtgtgtaaattgtattctcataatactgaaatgctttagcatactagaatcagatacaaaactattaagnatgtcaacagccatttaggcaaataagcactctcttt

SEQ ID NO: 9079 - DNA, 167 bp, Homo sapiens
  misc_feature (1)...(167): n = g, a, c or t
aaaactcttataataagngtnctaatagtaatatgaaacctgcttactgctcctttgtctgatacctgcatttctccaaatgataaaaaactttgtcacgaccttagttcaccaaaatgctttagcagnaagcatactatctaancncactatcantctnttgcaca

SEQ ID NO: 9080 - DNA, 244 bp, Homo sapiens
  misc_feature (1)...(244): n = g, a, c or t
ggnatctggcaggtgctaaataaatgtttcctggatcgaaatctacagtctcaaggagtcaaggctacaattcttaagttgcttcagatgactggttctatctatttatcaatacatccatcgatccactcatncctcatccatgcatnctcctacccttcctcttccccgtcaaacattcatccatccaattggtggcttggggaaagggacaaaaaggggaaaaaaaaaaaaaaaaaaggaa

SEQ ID NO: 9081 - DNA, 296 bp, Homo sapiens
  misc_feature (1)...(296): n = g, a, c or t
cctctgagcagaacgaggtaaatcttcactgttagctacaaagagcactgcatgaaagtgtgtgcaagatgactccatgaggttttctttttaagtttatgtatatttacagaaaagtgaaatgtgttggaagaataaacaccccttcttgtggacacttttagagaggagaattttgggctgggaaaaaaggagancctttttatttttttgctgctctctactgtttgtcttttctgtagntaatattaatattaattgtattaatattctgactttaatattagaaacttttt

SEQ ID NO: 9082 - DNA, 149 bp, Homo sapiens
  misc_feature (1)...(149): n = g, a, c or t
aaagaaatatataactatttattaaccactgttcagtatttacaataaagtaaacaatatacagttggataacattttgattactacaaagttgttcttcctggcttttgctgaaccagnaaagcaaactcaagattgagcctccatgt

SEQ ID NO: 9083 - DNA, 338 bp, Homo sapiens
  misc_feature (1)...(338): n = g, a, c or t
ttcgaatcaccctaacaagccgcaacggaaaatncttggaaaaggtgtgtgctgacttgataagaggcgcaaaagaaaagaatctcaaagtgaaaggaccagttcgaatgcctaccaagactttgagaatcactacaagaaaaactccttgtggtgaaggttctaagacgtgggatcgtttccagatgagaattcacaagcgactcattgacttgcacagtccttctgagattgttaagcagattacttccatcantattgagccaggagttgaggtggaagtcaccattgcagatgcttaagtcaactattttaataaattgatgaccagttgttaa

SEQ ID NO: 9084 - DNA, 170 bp, Homo sapiens
  misc_feature (1)...(170): n = g, a, c or t
ccatttatgaagatgaagaatacagtcagctttgtgaaanagnattgcaagcaagccccgtgggcaaatttgtattgagtccatctgtaatttgctcagtgatggcagacaagatggctgtctggttttgagacacactttaattttatgttaacttgttaaatcttttt

SEQ ID NO: 9085 - DNA, 600 bp, Homo sapiens
  misc_feature (1)...(600): n = g, a, c or t
ctgttagagtntttagagtcctgagataacaaggaatccaggcatcctttagacagtcttctgttgtcctttcttcccaatcagagatttgtggatgtgtggaatgacaccaccaccagcaattgtagccttgatgagagaatccaattcttcatctccacgaatagcaagttgcaagtgacgaggggtaatacgctttacctttaagtcttttgatgcatttcctgccagttcaagtacctctgcggtgaggtactccaggatggctgcgctgtacacagcggcagtcgcgcccacacgtccatgactggtcgtcctagattttaggtgtcgatgaatacggcccactgggaactgcaagccggctctctgcgagcgggaaaccgcctttgtcttggcctttccggagtcctttccagccttaccgccagccatttcgaattccgctgaagctcaagcaagcaaggcagagaaaaggctaatcggacccaccggtgagatcccaccacctactcctttcgacctgcccgggcggggcgctcaaanggncgaattcttgcannatatccatcacacctgggcggggcgcttcgangcatg

SEQ ID NO: 9086 - DNA, 373 bp, Homo sapiens
  misc_feature (1)...(373): n = g, a, c or t
ctgtagcttttgtgggacttccactgctcaggcgtcaggctcanatagctgctggccgcgtacttgttgttgctttgtttggagggtgtggtggtctccactcccgccttgacggggctgctatctgccttccaggccactgtcacggctcccgggtagaagtcacttatgagacacaccagtgtggccttgttggcttgaagctcctcagaggagggcgggaacagagtgaccgagggggcagccttgggctgacctaggacggccagtttggtccctccgccgaagacgacatggtcattattacgatcccacacttgacagtaatagtcggcctcatcgccggcttcgaccctgttgatggtcagggtgg

SEQ ID NO: 9087 - DNA, 474 bp, Homo sapiens
  misc_feature (1)...(474): n = g, a, c or t
tctgaattttattagagctcacacaccatatattaacatatacaactgtgaaccagctaatccctctgagaaaaactccccatctacccaatactgttacagcatacaatctctgttcttgggcattttgtcagtgatgctgatctttgccttcttccaggaacttgtaatagctggcatcgttgagaatgaatggaaaagaacgtgctccagacccaaatctaacatagttctcctgtcagcagaagaaaaaaagaacagactattgaaataaaagaagaagtggttgggctaactgaaacatcttcccaaccaaagaatgaagaagacattgaaattattccaatccaagaagaggaagaagaaagaaacagagacgaactttccagaacctccccaagatcaggaatcctcaccaatagaaaatgacagctctccttaaggngatttcttctgntttctggttcctttttt

SEQ ID NO: 9088 - DNA, 383 bp, Homo sapiens
  misc_feature (1)...(383): n = g, a, c or t
tngcaactaaagacacaagcctgaagaangaactattgaggatacctccaccgtctcccaaaacaagaaagaatcacattgatttaagataaaattttgccataagtcactaaattaagagtttttcgaaagagaaggcgcagtantcatcgtgagtgtttcactgaaagacagagctattttatttatttaatttgctccagccgttggcaaccagccactacaaatgggcctcttgngatcattnaaccggcagtatttattaaatttgtccttcagatgctgncggtattgttctctattgctgtagaaagactggttattanccntaaatgactgtatttcatcttgtgagataaagatttcctgatctganccncatt

SEQ ID NO: 9089 - DNA, 597 bp, Homo sapiens
  misc_feature (1)...(597): n = g, a, c or t
aaataaganntttctttaatcaggtatccctttggactgggagagcngtttatatcatagctttgcagcataatctttttactctcaggctcttcaagcatttttatcttctttgaaacttctatctaaacaaaaatagtattaaaaaagataacagaaggggttagattctgccaatgaactgtggacatcagtatctcattcttctatttgcctccttattctagtttgaaaaagctttggaacacattattacctatcattattacatatttcttgtagctttagtgttactcccccgactggaaatagaagttgctctttaataaggcccagggtgcttagggagcaatgcgagatttttcttacatctcttgggccaaccctatacaactaattctgggaaagggattgttataatacactgtccttgaaaagtttctttcagtccatttggagaaatgttgggataaagataacttagtgcttacaagntgctctattattagtaggtataataaccntaattattattaaacctaanagttatctattactttatcaccctntctccaatttatggntttctcctctttt

SEQ ID NO: 9090 - DNA, 305 bp, Homo sapiens
ctgtcttttggaggacgtacgtaataaggttttaatttagtaaaccaatcctatgcatggtttcagcactagccaaacctcaccaactcctagttctagaaaaacaggcacttggcagccttgtgatgtcatacagagaagtcacagggcagtacctgagggtctgtaggttgcacactttggtaccagataactttttttttctttataagaaagcctgagtactccacactgcacaataactcctcccagggttttaactttgttttattttcaaaaccaggtccaatgagctttctgaacag

SEQ ID NO: 9091 - DNA, 664 bp, Homo sapiens
  misc_feature (1)...(664): n = g, a, c or t
ctgaggcatnnttcctgggccagagtcgngtccaccaagggacagtanccaganctcctcttcctttaccaggcaaggtgcatcccctcagccctcctggcccttcagtcttggtgccacctgggcacaggggcaagcttggtggctgngagtccattcatctatcagagctggaacctcatccctgcacagatgaggaaaccaaggcatggagcagtncccagagtcgaatctanatctcatctgtcatccgggncttatcctttgctctgtttttctcttcaggctctggaaaatcagatctgtgacttaatcttcctctccctggccctcacccacttagnttctttttcattcctgctccctgccttaactcctcctcccactgcccctgatcccaggcccaggcttttacaacctggtgctcagcttccccatcagttgaaaaggggtggctagagnaactaacctcagcaggccgtccagccttgatagtctgnggatttcggatccttctcaangaagcttcatgtctaatgggagactataattataactcctgttctgcatagagcatttgcatcaaaggctttccatacccctccctcccctggtcctcataagaatccttgaagnangntcctattcctnattggcnaccatg

SEQ ID NO: 9092 - DNA, 451 bp, Homo sapiens
  misc_feature (1)...(451): n = g, a, c or t
cctacagacttatttcttcttggacacacccacggtgcggccacggcggccagtggtcttggtgtgctggcctcggacacgaaggccccagaagtgacgcagccctctatgggcccgaatcttcttcagtcgctccangtnttcacggagcttgttgtncanaccattggctaggacctggctgtattttccatcctttacatccttctgtctgttcaagaaccagtctgggatcttgtactggcgtggattctgcataatggtgatcacacgttccacctcatcctcagtgagttctcccgccctcttggtgaggtcaatgtctgctttcctcaacaccacatgagcatatcttcggcccacacccttaatggcagtgatggcaaaggctattttccgcgcccatcgatgttggtgttgagtactcgcaaaatatgctggaacttttcag

SEQ ID NO: 9093 - DNA, 409 bp, Homo sapiens
aaagtcatgtttattgaagtatgattttacattcagcaaaattcatcctgttaaggtttgacaaacgcacagtcataccataatcaagatgcagaactgtagaatcacactaacaattccttcctgcccttgtaatcaacccctttttgatcccaaggaactcactgacctgtttttctgtcaaaagtatcaaatttcatcactaaaatgatctacagtactatggaaaaatgtgtaagcacataaaatacacaaacctatttttttaaaaatgagatacttaaaatttctttagcataccaacaaaaaatgaaggtagcattgcattttactacagatgtgcggacattcaaagtccaccattgtcgtatatatggctcaacagtaatatttaagaatatactgctgg

SEQ ID NO: 9094 - DNA, 215 bp, Homo sapiens
  misc_feature (1)...(215): n = g, a, c or t
gttgtctaccttnttttcttcctcatttccttcttttattcctccccaccccaaccccttaaaaaaaaggtcagaaggacaaagctggtttgtttgggaaatggactgatcgaaagaaaacttgccaaagtggaaaggtggcttttagcattctgtgtttccaaataatgaatttgaacaccaggttgggttaattaaagcttttggtataattt

SEQ ID NO: 9095 - DNA, 408 bp, Homo sapiens
  misc_feature (1)...(408): n = g, a, c or t
ctgcaatgtggccttgattttctcatcagtaaaatgggaaagctggatttggaggctggaagagatctcacagcttgaccaccctagtaggagggagggagaccagacggaggccaggcaaccgacccaggcagcatctggctcagacgcagacacatcttcatgttgagggacctattcttacacagcaaaacccagagaagtcgactgctcagcctgagcctgtcatccctatatagactcancttttaggagaagagggagagttgaggagatagcatcgctctctgtatcagtgtctgatgatctggagtctgcccctggggtcactcagtcactcaacaaacatttgttgagctcttaacgtctatangggngtgagctctgcccttcgaggctgtatgtctc

SEQ ID NO: 9096 - DNA, 373 bp, Homo sapiens
caggacacagcatggacatgagggtccccgctcagctcctggggctcctgctgctctggctcccaggtgccaaatgtgacatccagatgacccaatctccttccaccctgtctgcatctgtcggagatacagttacaataagttgtcgggcctctcagaatatagatcggtggttggcctggcatcaacagaaaccaggcaaagcccctaatgtcctaatttatgcgacttccagtttagaagaaggggtctcattaagatttactggcagtggatctgggacacaattcaatttaaccatcaccagtctgcagcctgacgattcagcaacttattattgtcaacattattctgcatctcttcgcagttttgg

SEQ ID NO: 9097 - DNA, 482 bp, Homo sapiens
  misc_feature (1)...(482): n = g, a, c or t
cctttggggaactgggatgcttatttcctctgccttccttggctgcccacatggatgcctaagtgtcttccctccgggatagagtgtcctccgtgcacatgctgaagagttgtctttcttgacgtaggccagaggcattgatgtgcagcaggtttctttagtcatcaactatgaccttcccaccaacagggaaaactatatccacaggtaagcgtagatctggaacactcccctaccccttcacacctggccctccctgggcttaaagctcctgatattcctcatccccttccttgttttccanaatcggtcgaggtggacggtttggccgtaaaggtgtggctattaacatggtgacagangaagacaagaggactcttcganacattgagaccntctacaaccctccattgaggaaatgcccctccatgttgctganctcntctgagggggtgtcctgccaccccacccccagccagggg

SEQ ID NO: 9098 - DNA, 117 bp, Homo sapiens
  misc_feature (1)...(117): n = g, a, c or t
ccttggagactcagatcctgaacaanananaacaaaatctctactttgatggaacttccattctgtggggaagagactgacaatnagcaattaaataaataagaactcagcagtagg

SEQ ID NO: 9099 - DNA, 619 bp, Homo sapiens
  misc_feature (1)...(619): n = g, a, c or t
aaaagctcagctcgaacctcacggattttcctgacaatctgcttctctcaatggccttaatttaagtgagggttgtcagtcttactgggtctcgttttttgtcttaaataataactatttatgggtatcaagtgtctcctcaatttggctatgatccttcacggcagaaatactgtcttatcttgtgatcatggagtcacaagatttcatggctaggaatattcgtcaaattaatcctagattgaggatcaggtagtatgtggtctgattctaactcaacaacttgcagaaactcacttcttttttctttttttttccccaggaggagctatcgtattaactgacgaaactcacttcatttctttggacctgcanaatgaggatgggctctaaaccacctctaaaggtaatattctatgattccatgataaggctatttgtcatttataaaaaaaggaacttccacatagcccagagaaaggaaatgactttttcaagtttacaganncaattaatggacgaaatataattgtgaaattcaatctcctgatccccagnctatnggggagttctttcaaaatggccccttgactgtccctcaaagtgccagcatgcagga

SEQ ID NO: 9100 - DNA, 431 bp, Homo sapiens
  misc_feature (1)...(431): n = g, a, c or t
aaaaagtaagccactgcctcttacctaaaggtcagcatgggcttcatcatacagcggtcaggtccatcatacagcggtcaggtccatcatacagcggtcaggtccatcatatggcggtcaggtccatcatacagcggtcaggtccatcatacggcggtcaggtccatcatacagcggncaggtccatcatacggcgctcaggtccatcatacagcggtcaggtccatcatacggtggtcaggtccatcatacggcggtcaggtccatcatacggcggtcaggtccatcatacggcgctcaggtctgtaactcttgacaggaaggtgcactagcagaatggcganatgcactgagggtaaccagatgatctcatgggacttacccagtgttagcaccaaagtcccatgaactgaggtgctaaaacataaagg

SEQ ID NO: 9101 - DNA, 533 bp, Homo sapiens
  misc_feature (1)...(533): n = g, a, c or t
aaatcttactatcaactattcttaacaggctaaaggttggtcttcaggttgtggcagtcaaggctccagggtttggtgacaatagaaagaaccagcttaaagatatggctattgctactggtggtgcagtgtttggagaagagggattgaccctgaatcttgaagacgttcagcctcatgacttaggaaaagttggagaggtcattgtgaccaaagacgatgccatgctcttaaaaggaaaaggtgacaaggctcaaattgaaaaacntattcaagaaatcattgancagttagatgtcacaactagngaatatgaaaaggaaaaactgaatgaacggcttgcaaaactttcanatggagtggcctgtgctgaaggttggtgggacaagtcgatgtttgaagtgaatganaagaaagacaganttacagatgcccttaatgctacaagagctgctgntgaagaangcattgttttgggagggggttgtgccctccttccatgtattccnnccttggactcattgactccncct

SEQ ID NO: 9102 - DNA, 519 bp, Homo sapiens
  misc_feature (1)...(519): n = g, a, c or t
ngggtctgggtacttcattattgganggagcaggtatgtggctggcattgaagggttttttggacccctgaagtactatcgccttcgcagtctgcaccccgcccagatttttaatcccctccttgagaagcaacttgctgaacaaatcaagttatattatgaaaggtgtgctgaggttcaaggaatagtatctgtgtatgcatctgcagcaaagcacgggggcgagagacaagaagcatgccacctccacaactcctacctggacctccagcgcaggtatgggagaccctcgatgtgcagagccttcccctgggagaaggagctgaaagacaaacaccccagcttgttccaggcattgctggagatggatctgctgaccgtgccaaggaaccaaaatgaatctgtatcagaaatcggngggaagatatttngagaaggctgtaaagagactctctagcattgatggncttccccaaaattanctctatcgccccnttctgacggattcccancctcggn

SEQ ID NO: 9103 - DNA, 381 bp, Homo sapiens
  misc_feature (1)...(381): n = g, a, c or t
nncatggcccaccacctgcccttcagtgttcaagcaggggacatgcaccctttagtaacctggaggggacccatcacatgacaaccaccccaatgaccatcatcaggaagccgctgcctgactgagatatgcccccaggaggacaagggagagtggatgctggaaagacagggcaggggaccatcaccagggaaagacttcattcttcggaggacattgaacctggggctgggtctgtancggagccgctgtttcttctcctgtatccaactgttctaactcttgggctttctccattttcagctctttcttttcctggccttctcattgctggttccttcaancctcctctctattcttccgacaatatatncttttttt

SEQ ID NO: 9104 - DNA, 459 bp, Homo sapiens
  misc_feature (1)...(459): n = g, a, c or t
naaaattgatcacaacgaggganaacaaaataaaattagggggcaaagggtaggagtatggggggaggggagagcaaacctatcgaatatatcttagaattttgctcagaaatcactgctgcctctcaagtgttgcattgtccctgcctaaaccaagaaggctaaacaaagcccctcctgtttgaattcttaaggtaagaaatttctaagctaagaaaacactattgcctaaaaccaatgatagtggagctcatttacaaataggcatgcctcacacacacagtccaaaggcaagacactggctttgaaattaggctcatgatgtgattcctattatatgtacctgatttttttaggccccaggtatgtggaccanagttaatgtcatgactcttcaaagatatgatgaananttnccctagaaatctagagatgcatgtttatttaattccatanttt

SEQ ID NO: 9105 - DNA, 140 bp, Homo sapiens
  misc_feature (1)...(140): n = g, a, c or t
ncttntgcgccctccctgagcaccggctcaggcaccggggtcaggctgcaggaacacatggacagggagaagtaagagtagtccactgcaacgtatgtcagcatgaagttgatggtgacgatgggggccagaacgttcac

SEQ ID NO: 9106 - DNA, 262 bp, Homo sapiens
  misc_feature (1)...(262): n = g, a, c or t
nggtcctagggcactggaagggtaggaggagcacagagaaccttccatggcccctttggttctctgcctttggatggatggatttatgctggcattgtctggagggagccgggtgtcccccaataatcacagaacaaagacaattaggtcgggggaggaataaggataaaaagagaccccaacagaccctgcctgcccttccctgccccccggctgcactgctgaaatatgaggaagagatggctccagtgtggggtgctgg

SEQ ID NO: 9107 - DNA, 343 bp, Homo sapiens
  misc_feature (1)...(343): n = g, a, c or t
gggtctgtgtttggtggcccaggtnctaatttcaagatgccaggacgttccagttcaaattcaggttcaactggtttcatctccttcagtggtgtagagtctgctctctcctccttgaaaaacttccaagcctgtatcaactctggnatggacacagcttctagtgttgctttggatcttgtggaaagtcagactgaagtgagtagtgaatatagtatggacaaggcaatggttgaatttgctacattggatcggcaactaaaccattatgtaaaggctgttcaatctacaataaatcatgtgaaagaagaacgtccanaaaaaataccngatttacctcngn

SEQ ID NO: 9108 - DNA, 608 bp, Homo sapiens
  misc_feature (1)...(608): n = g, a, c or t
nctgataacgttcacagccccatcctcagcacgtggattcgagtcaccgtgagaacccttttgtctccttcagttccggtatctcaccctgtcctcaccttcagggctcccagggcccacactgtggtgggggacctgctggagcttcactgtgagtccctgagaggctctcccccgatcctgtaccgattttatcatgaggatgtcaccctggggaacagctcagccccctctggaggaggagcctccttcaacctctctctgactgcagaacattctggaaactactcctgtgatgcagacaatggcctgggggcccagcacagtcatggagtgagtctcagggtcacagttccggtgtctcgccccgtcctcaccctcagggctcccggggcccaggctgtggtgggggacctgctggagcttcactgtgagtccctgagaggctccttcccgatcctgtactggttttatcacgaggatgacaccttggggaacatctcggcccactctggaggaggggcatccttcaaacctctctctgactacagaacattctggaaactnctcatgtgaggcttgacaatggccctgggggccccagcaca

SEQ ID NO: 9109 - DNA, 443 bp, Homo sapiens
  misc_feature (1)...(443): n = g, a, c or t
ngggtccattgcctcggccccaacnacaccaagcccatcaaggttttcattgctcagtcccgatcatctggaagccaccgagatgttgaagatgaagaacttacaanaatctttgttatgataccaaagtcctacacagaagaagatctgcgggaaaaatntaaggngtatggagatatcgagnattgcaccattattaanaataaagtgactggagaaagtaaaggnttgggctacgtacgatacttaaaaccatcacaagctgnccaagcaatagaaaactgngatcgaagctttaganccaatcttggctgaacctnaaantaaagcntctgaatcctctgaacaagattattatagnantatgaggcangaagctctgggacatgaaccctanaataaatatgtntncatttggcaagnngcgccacctttactttnaa

SEQ ID NO: 9110 - DNA, 541 bp, Homo sapiens
  misc_feature (1)...(541): n = g, a, c or t
nagaaagtggttgtgatcacaaagcacaacgatgatgaacagtatgcttgggagtcttctgctggaggttccttcactgtgcgtgctgaccatggtgagcccattggcaggggtaccaaagtgatcctccatcttaaagaagatcagacagagtacctagaagagaggcgggtcaaagaagtagtgaagaagcattctcagttcataggctatcccatcaccctttatttggagaaggaacgagagaaggaaattantgatgatgaggcagaggaagagaaaggtgagaaagaagaggaagataaagatgatgaagaaaagcccaagatcgaagatgtgggttcagatgaggaggatgacagccggtaaggataacgaanaacanaactannaagatcaaagagaaatacattgatcaggaagaactnaacangaccaagcctatttggaccagaaaccctgatgacatcccccaanacgagtattggagaattctacanganccctcncntaatgactggggaanaccacttggcagtca

SEQ ID NO: 9111 - DNA, 264 bp, Homo sapiens
ggaacatactgagttaacacattttcctagtagtgatagaattttcagggaagcaagaaaccaagaaaattctggctgctacctaattttaatgaagttggcgattatctgcccacaaggtatgagaagtatagatgtgcattgctctacaaatatacaacgcaataaggcccactcgaaattcatgaaaggcttgccaagccacatggcttgattggtcgtaggtagatgcatgatgtccctcttagaatgaggcccatgttt

SEQ ID NO: 9112 - DNA, 333 bp, Homo sapiens
  misc_feature (1)...(333): n = g, a, c or t
ncctgcttcacttgcagataagtttattataattctccagaaatgtgcaggatgtgcattagcaaattgcactgtacttttcactccagcctgggtgacagagcaagactcccgtctcgggggcttaaaaaaaaaaatgctgtatctaaatgaatctgtgtaattgggcccanatgtgggtttgctcagtattagtagacaaggtctttgttcanacgattaggtgcctaactggcaaatgccttagtttcttaaaacgtattttctgatgnggctttacatttcaaaagtgaacttgattcaacctganaaaactgattaaaaaattagttt

SEQ ID NO: 9113 - DNA, 380 bp, Homo sapiens
  misc_feature (1)...(380): n = g, a, c or t
naaatcanacgtgtaggtttgctttgtattgccctgcatgacacatgtcaggaagatcgccagggaggggaggttacaagcccaggttgcaggaataacctttactctgaattttggtctgaaagacttttccttcgtctggagctgggctggccttgtgatattgtgccacagcagacacgacactgtctccaaggcggagctcattgcctggggctttcccactgcactgaatgagaatttatttggcctttaatgaaattcagattgtcccatttatgcagncctctgtttaangtgacaggcactgaatatggttgctttcaancaagttattttgtttaaccaggggcctancggagttcgggatacacagatgg

SEQ ID NO: 9114 - DNA, 623 bp, Homo sapiens
  misc_feature (1)...(623): n = g, a, c or t
ctgaanaagggaagggcagtgatggggttatggaggaagtatggcagggaaagcaggagggtgatgctggaagacaaatggtagatcccaggcggactggaaagaattgcaatagggggagccggggagtgcagtctgtgagaggctggaaatgtgaaagccaggagctctcagggatttgggttgcctcctgcacagtcaaggagagtgtcactcaggctagtcatagatggcatacctacaggcttgggctgattttagatagttgttcagagcagtcaggcaggcgccagaggcacaagccctgtgagaggtgtgtttggaatcacttggtatccaaatcacatgtcatccctaggagcaaggagaccggttggatttggggctggtctggaatgaagaagcatctctcagcttccgaaggctgcatggctcacggcagtatctcaatcatgccctgcccgtttgcacatttggtcctgttggnagttacctctctggtgactggcaaagtcngcaaggatattggggtggagcaccctggctaagcaccctcttgattatagagctatggagtacaanacagatggagaatgagaggacctgccccgggcgggcccnct

SEQ ID NO: 9115 - DNA, 311 bp, Homo sapiens
  misc_feature (1)...(311): n = g, a, c or t
nggtctgggtcagtgctgctctctaaatctttaagttttgttcttctgtactcgctttccctattttcattgctttagttctgcccttcatcatcttgcctgaattagtataaattttctaacaggtctctctgcctccagtatcatacctctctaatcttaagtataaatgtgattatctttttcctgtttgaaatccttcaattacagttncagacacanatctcttcatgatttatcacctgtttacctcttcagacatagcaactttttttttttgganacagagtctcattctattgcccaggtta

SEQ ID NO: 9116 - DNA, 511 bp, Homo sapiens
  misc_feature (1)...(511): n = g, a, c or t
ccagcggaaagttttatttacctgtttcaagaggaatgataaacgtgaagtaaaagttgcccagttggctggctctgttgctgagatgtcggcttatcatcatggagaacaagcattgatgatgactattgtgaatttggctcagaactttgtgggaagtaacaacattaacttgcttcagcctattggtcagtttggaactcggcttcatggtggcaaagatgctgcaagccctcgttatattttcacaatgttaagcactttagcaaggctactttttcctgctgtggatgacaacctccttaagttcctttatgatgataatcaacgtgtagagcctgagtggtatattcctataattcccatggntttaataaatggtgctgagggcattggtactggatgggcttgtaaactacccaactatgatgctagggaaattgtgaacaatgtcagacgaatgctagatggcctggatcctcatcccatgcttccaaactacaaaaacttt

SEQ ID NO: 9117 - DNA, 617 bp, Homo sapiens
  misc_feature (1)...(617): n = g, a, c or t
ngncttgcctcanatccaaggtcactcggaagaggccatgtctaccctcaatgacactcatggaggaaatgctgagagaagcattcagatgcatgacacaaggtaagactgccaaaaatcttgttcttgctctcctcattttgttatttgttttatttttaggagttttgagagcaaaatgacaacacccagaaattcagtaaatgggactttcccggcagagccaatgaaaggccctattgctatgcaatctggtccaaaaccactcttcaggaggatgtcttcactggtgggccccacgcaaagcttcttcatgagggaatctaagactttgggggctgtccagattatgaatgggctcttccacattgccctggggggtcttctgatgatcccagcagggatctatgcacccatctgtgtgactgtgtggtaccctctctggggaggcattatgtatattatttccggatcactcctggcaccaacggagaaaaactccaggaagtgtttggtcaaaggaaaaatgataatgaattcattgancctctttgctgcatttctggaatgattctttcaatcatggacatacttaatattaaaatttcccatttttt

SEQ ID NO: 9118 - DNA, 214 bp, Homo sapiens
  misc_feature (1)...(214): n = g, a, c or t
nggtctgaataggcacccaaaagtccgtgactaaatttcgtttgtctttttgatagcaaattatgttaagagacagtgatggctagggctcaacaattttgtattcccatgtttgtgtgagacagagtttgttttcccttgaacttggttagaattgtgctactgtgaacgctgatcctgcatatggaagtcccacttcggtgacatttcctgg

SEQ ID NO: 9119 - DNA, 357 bp, Homo sapiens
ccacactgtgaaccctcccagagactttagacagagagaggggctccacaacaccccggtattctgtctgccctctctcacccccttccctgtccacacaggtcagcccaaggccaaccccactgtcactctgttcccgccctcctctgaggagctccaagccaacaaggccacactagtgtgtctgatcagtgacttctacccgggagctgtgacagtggcctggaaggcagatggcagccccgtcaaggcgggagtggagaccaccaaaccctccaaacagagcaacaacaagtacgcggccagcagctacctgagcccgacgcccgagcagtggaagtcccacagaagctacag

SEQ ID NO: 9120 - DNA, 457 bp, Homo sapiens
  misc_feature (1)...(457): n = g, a, c or t
ctgncttancaagcaccctangagcatgaatatacaaagaccacaagcttacacatctttttaacatacacaaccgattttacttacctagccaaggcatattcttcctgtgcggtacctccacctacctctgctaccctatcaactggactggtacctgtactctggtttttctaagcccaaaaatcgacattgtcccaggagaacaaaacctacctatccctgtaaaaactcaagtgtgccaatgcagggccgttcagttaatacccatcctagtacgactaggaatgactactgcagttggaaccggagtggtcgggctttctacttccctcatgtactattgctccctctcacaagatcttacaaacagtttggaagacttacctaatactgtttcaaccctccaatcacagatagactccttagcagcagttgtccttcaaaatcgcagagg

SEQ ID NO: 9121 - DNA, 241 bp, Homo sapiens
aaatgacccgtaactaaatcctagatttttatctagtcagtttctttttttccaagtcctatctttcacagttgtgcttctgggatttactcacagccatactaactgggagtcaagaaaagggataaggggaataacggggcttagtaagctctggaattactggatgaacacatcttatgagatgaaacaatgacaggaacgctaccaaggcagcagtgtcaccgcatttgacgttttt

SEQ ID NO: 9122 - DNA, 347 bp, Homo sapiens
  misc_feature (1)...(347): n = g, a, c or t
nggtccgccgcggactccggcagctttatcgccagannccctgaactctcgctttctttttaatcccctgcatcggatcaccggcgtgccccaccatgtcagacgcagccgtagacaccagctccgaaatcaccaccaaggacttaaaggagaagaaggaagntgtggaagangcagaaaatggaagagacgcccctgctaacgggaatgctaatgaggaaaatggggagcaagaggcngacnangaggtagacgaanaagaggaagaaggtggggaggaagaggaggaggaagaatanggtgatggtgaggaagaggatggagatgaagatgaggaagctgagtcn

SEQ ID NO: 9123 - DNA, 204 bp, Homo sapiens
ctggtcctccagccgcctcagctccttcacagagctctcctggaaggactcctgggtcatgctggtcccagagagagaagagtaagcctcggatctctttggtgggaggtaaggccacaccaaagatgaaagaggaccccctagtgggctcccgtcaggagagcgggtgcccagcactcattgtgaacctgagaaggggcaagg

SEQ ID NO: 9124 - DNA, 356 bp, Homo sapiens
  misc_feature (1)...(356): n = g, a, c or t
gcctggtaggttaaggaacagannacattttgagagacgcttggngccaatgaagtggctgaagaaatgtctggatacaggttttccaatttaccatttgtgtctggggatagngggaggcagncccatctatggcttggggaggctgtagccattcctcctctttcccttgtaagagtgagaaacccatccatggccttctctantcaatacagnggcctggnntgaattanacaaaggaatcccctttgggaggatacancccctatgccaggatgtatggcatggtgancagantgcaccgctttcacttgnttctttggctaggagtgtttgcgcagtnccccaaccacacn

SEQ ID NO: 9125 - DNA, 622 bp, Homo sapiens
  misc_feature (1)...(622): n = g, a, c or t
ctggcagctcacattttacattagagagtggggtccccacattttacattacagagcggggtccctgagctgcaggaggagagcctgcagggctcttgggtagaattgcacttttgcaataagggaaacgggagcaatgtttcagcctcagtttctatttataatactgacacaaaaagaatattgctggatacatagcatggatctagatagagcagctccaggagttctcacggtgacagcccccctcactcacagacaccatgtgatattaatagggcttagacacaaagcactgaattcccaaagcattgaagagaaagacagctctcagtctgagtaaaaccgtattgagagaagaaaagaggttgaaagaatcttanagacaaattcagattacntgtaacattggtcaaattgaccagaaaatattcttccaaagaagttcttntctaaacaccaaaagtgcacagctactctcagcatgagaaatacaagtattatgagaaagagggcttattctgagcagaatttncntctctgctgctctcccatctgcccggcccgntgggatttggggaaatctatacttggaacacacctgacaacctccnccngactt

SEQ ID NO: 9126 - DNA, 144 bp, Homo sapiens
  misc_feature (1)...(144): n = g, a, c or t
aaagngagcagcgccaanttccttaaagataagcttgggnanataggagcacacnaanatgagntcanctttgaacagntccatctcttctataaaaaacttatgttttgancagcananatcgatnctcgatgaattcaaaaa

SEQ ID NO: 9127 - DNA, 657 bp, Homo sapiens
  misc_feature (1)...(657): n = g, a, c or t
nggtaaaattgttttgtattttcttattcctgttccctttaccctttgacaacttgaaatgttaccacttcgtcctcatgatgttcttctatcaaccctgcttaggatgagaacaagttgagcagtgccaacggccatgaagaacgtagcaaaaaacaaactttctgcctccttggaaagctctacatctccttgtgattggagtgtgggtttcaagattccagaaggaggaaaaaaagcaagagcagaagtcgtagtcatgaacgaaagagaagcaaaagtaaggaacggaagcgaagtagagacagagaaaggaaaaagagcaaaagccgtgaaagaaagcgaagtagaagcaaagagaggcgacggagccgctcaagaagtcgagatcgaagatttagaggccgntacagaagtccttactccggaccaaaatttaacagtgccatccgaggaaagattgggttgcctcatagcatcaaattaagcagacgacgttcccgaagcaaaagtccattcanaaaagacangagccctgtgagagaacctattgataatttaactcctgaggaaaagagatgcaaggacagtcttctgtatgcagacctcggccgcgaccccgctaanggcggaattcccancaccctgggcggcccg

SEQ ID NO: 9128 - DNA, 292 bp, Homo sapiens
  misc_feature (1)...(292): n = g, a, c or t
naaatttgaaaagcatcatgttctcatgatttatgggaatgaagcaagtactgaaatcaaattaaatactccctgggtcctgggtcagnttgaccctagccctggggtgaggcaagccccctcctatgaggatgagcaaaaatactactctcttcgccctgagttgctttctggatctggggcttcaggacttgctgnttcantcagcctttattancaccnaagactttatgaagatcccacacacagacacacatcccttncccgcctcccccctgcccttnngtagnat

SEQ ID NO: 9129 - DNA, 113 bp, Homo sapiens
  misc_feature (1)...(113): n = g, a, c or t
anataagctgctatcagaagagntatcacttcgatttgcaagttccacagcatcagatgtcacatggtcaagagaatctattcctgatttatccatcaattgctctttgtttt

SEQ ID NO: 9130 - DNA, 431 bp, Homo sapiens
  misc_feature (1)...(431): n = g, a, c or t
cngatgccccaggaggccggcctggcggaggagttcctgctcactgacaatagtgccatatggcaaacggtanaagaactggattacttacaagtggaggctgaggccaagatggagaacttgcgagctgcagtgccaggtcaacccctanctntggtgctggancanggcctgatataggngngtggccctnacagactgcccgtggtggccccaaggacacccagcccagctatcaccatggcaatggaccttacaacnaccnggacatccctggctgctggtttttcaagctgcctcacaaggatggtaatacctgnaatgtgggaagcccctttgccaangacttccctgcccaaaatggangatggcaccctgnangctggcccaggangtgncagtgngccccgngctctggcaaatcaacanaa

SEQ ID NO: 9131 - DNA, 317 bp, Homo sapiens
  misc_feature (1)...(317): n = g, a, c or t
accttttccatgtatgaacctggctctgccctgaagccctttgggggcccccctggggacnagctcactacgcggctgcagcctttccacagcactgagctagaggacgacgccatctattcagtgcacgtccctgctggcctttaccgggnaagcctnggggaancgtgtncatcttaaccagtaggttctgagccccagggggttntggnctctgcgctgaattcggggcttaagatgattagactgaccttggtccctgctgcactgctggtgagcaggggggcagtggggcacactgactccatccancgctg

SEQ ID NO: 9132 - DNA, 224 bp, Homo sapiens
aaacaatgaaactttttcaaaaagaaaaaacaaaaactttaactttgtgtaaaatcttatagtattatcagcttagagggaattgatatttttaatattgccgttatattccaaaatatatattgagataaatgaactggtgtagaatatcagtttgctatttagttttatgaattactatacatatacatgcatagaaatgaaatgctatactgataaatttt

SEQ ID NO: 9133 - DNA, 486 bp, Homo sapiens
  misc_feature (1)...(486): n = g, a, c or t
cctgttctgttcctggaagttcctgtaacattgagtgtcaccactttactgtgctgggcccccaggccattgtcagcctcacatgagtagtttccagaatgttctgtagtcagagagaggttgaaggatgcccctcctccagagtgggccgagatgttncccaaggtgtcatcctcgtgataaaaccagtacaggatcgggaaggagcctctcagggactcacagtgaagctncagcaggtcccccaccacanctgggccccgggagccctgacggtgaggacggggcgagacaccngaactgtgaccctgagactcactccatgactgtgctgggcccccaggccattntctgcatnacaggagtagtttccagaatgttctgcagtcataatagaggttgaaggacgctctcctccnnaggggggctgagctgtttccccnngggtgacatccttcatgatanaaatnggnacagggattcggg

SEQ ID NO: 9134 - DNA, 150 bp, Homo sapiens
  misc_feature (1)...(150): n = g, a, c or t
ttcacaantnccctagcatcatagttgggtagtgttacaagcccatccagtaccaatgccctcagcaccatttattaaaaccatgggaattataggaatataccactcaggctctacacgttgattatcatcataaaggaacttanngga

SEQ ID NO: 9135 - DNA, 229 bp, Homo sapiens
  misc_feature (1)...(229): n = g, a, c or t
ctgcgattttgaaggacaactgctgctaaggagtctatctgtgattggagggttgaaacagtattaggtaagtcttccaaactgtttgtaagatcttgtgagagggagcaatactacatgagggaagtagaaagcccgaccactccggttccaactgcagtagtcattcctaggcgtactacgatgggnattaactgaacggccctgcattggcacacttgagttttta

SEQ ID NO: 9136 - DNA, 204 bp, Homo sapiens
  misc_feature (1)...(204): n = g, a, c or t
nnttgccccttctcaggttcacaatgagtgctgggcacccgctctcctgacgggagcccactagggggtcctctttcatctttggtgtggncttacctcccaccaaagagatccgaggcttactcttctctctntgggaccagcatgacccangagnccttccatgagagctctgtgaaggagctgaggcggctggaggaccat

SEQ ID NO: 9137 - DNA, 199 bp, Homo sapiens
  misc_feature (1)...(199): n = g, a, c or t
taccataagaaaaacacaacagttttaggnngntgataaattaattcctctctgntgtaaacctaaaactaaacaaaaacaaaaatacccagagcagatggggagagggtgggaggcggaacacacactcatacacacacacacactcacgcacacacacaancagtncacgttaagctctgcatncccactatanggg

SEQ ID NO: 9138 - DNA, 113 bp, Homo sapiens
  misc_feature (1)...(113): n = g, a, c or t
ttnacaaagagcaattgatggataaatcangaatagattctcttgaccatgtgacatctgatgctgtggaacttgcaaatcgaagtgataactcttctgatagcagcttattt

SEQ ID NO: 9139 - DNA, 235 bp, Homo sapiens
  misc_feature (1)...(235): n = g, a, c or t
acaaaagtgtttggagtttgtacttattcctgcnttgaactttatttcttgtctttctattcttacttaagctgtngttatagaaaaccggagcttgagtttctgaaaaagactgatgggctacttctttatagataaaaaggggttcataaattagtgcaaatatnttaggaccttttcagcacttggcgtaggatggaagaggtaagaggtaagaanatactctgtngaagtt

SEQ ID NO: 9140 - DNA, 249 bp, Homo sapiens
  misc_feature (1)...(249): n = g, a, c or t
aggccaggaaatcaaagagaagatggaacgctgcgacaaagaaggtcagcgccaggaagtataagttggtatctacaaaaattcctttcacctcatcagcatctttctctgaaaacccgaactgctgcagggagtacacggcgtcctgcatgtggatccanaagcgcagccgccccagggagaccttgtcgtaggacacggtgaggggcagctcggtggtggnaagcggattatgaccatcaggnccct

SEQ ID NO: 9141 - DNA, 237 bp, Homo sapiens
  misc_feature (1)...(237): n = g, a, c or t
caaaatctttataaactgtgtctganaaagtgcacacgtgtgtgtgacatgctcaaaggtcanacaaggggtggncaggaagggatgtattttacaagccacttgtatctttttccaaaaacacctacccatgttnggggaatgttaaacaaaatcaaaanacaaccttttgtagccgttggaagcntcatgtnctttcttctaacttggcttcnccagcggaagngaccgtggtgg

SEQ ID NO: 9142 - DNA, 247 bp, Homo sapiens
  misc_feature (1)...(247): n = g, a, c or t
nttatatattcatctataatagcaaagacaanagtgtatcttccagaagatgcctctggttgctaaccagtctctgtgaagaagctgcagttacccaggcttctgtaactcaggacattgaagtagtcatgcagctcggcacagtcccctccccgctgctctccacagagcccagcaggtgcagcttctgcctggacacagcttcctgggggtgagggagcactggggctccattcctcctgtccag

SEQ ID NO: 9143 - DNA, 214 bp, Homo sapiens
  misc_feature (1)...(214): n = g, a, c or t
tttctcaggttgaancaagttcacttttgaaatgtaaagccacatcagaaaatacgttttaagaaactaaggcatttgccagntaggcacctaatcgtctgaacaaagaccttgtctactaatactgagcaaacccacatctgggcccaattacacagattcatttagatacagcatttttttttttttaagcccccgagacgggagnnttgct

SEQ ID NO: 9144 - DNA, 217 bp, Homo sapiens
  misc_feature (1)...(217): n = g, a, c or t
tgtntnaaatcatagaatctgctcgaagaaganaatnaggacctgctatccactgggagaggctatcagccantcctgggacttggagacccagcatcctttgcattactttttccttcaggatgatctanagcagcatggagctgttggtanaatattagttnttaaccatacattgtcccaaaagngtctgtgcatngtgcaaaanggaaactta

SEQ ID NO: 9145 - DNA, 254 bp, Homo sapiens
  misc_feature (1)...(254): n = g, a, c or t
ccaaataatgggggagaactgtcagtgcccacacccatttctcagtggtcagtttcagccgctgttgactgaagacaaacgaactcactatgttcttcacaaagatcattttttttaantaagaaaaatgtttcaactctcttgcctttccttcagcgaatgaaatgtgacgggctaaatacgccagtcactcatgcgccgnagggacacatggtgcatactgnngngcccaggtngcaaacagaatncccaag

SEQ ID NO: 9146 - DNA, 166 bp, Homo sapiens
  misc_feature (1)...(166): n = g, a, c or t
attgtgggtccaccacnccanctttgcttcattttacttctgctgcctctnctttctnttgctaccctgtgctgcatgangaatntannataatttgtaacaccctgggattccttaaagaaaacananaaggactagactcccctttnngggagcaactctctgt

SEQ ID NO: 9147 - DNA, 243 bp, Homo sapiens
  misc_feature (1)...(243): n = g, a, c or t
ccacttgtgtgggtcctcacaagcaaagagagcnctaaacttgacattgggggtccaccactccaactttgctttctgaaggttttggtgtacattgagccccagaaggaaaggagagtatntgtgagtgggggcctcccttgaccccagtacgaagtctatgccctgaatccccagagnagnccctcctggtgcccaactggcctggggacnaacagcggnncactacatntaggactgcnt

SEQ ID NO: 9148 - DNA, 109 bp, Homo sapiens
  misc_feature (1)...(109): n = g, a, c or t
tcaccctgaccatcaacagggtcgaagccggggatgaggccaactattactgtcaagtgtgggatccgtaataatgaccatgtcgtcttcngnggagggaccaaactgg

SEQ ID NO: 9149 - DNA, 510 bp, Homo sapiens
  misc_feature (1)...(510): n = g, a, c or t
ctgaggacaaacatgagatgagcatagtcagggacagatgtttgggagaaacaaaaggagggtaagtaggaagcgcagggcaaaggcaggcagagcgagtattgcagcagcctttgctgcgtgctgggaagtttctaacaatgcagggctcttggaaagcactgagattgcagcacttgttttgatagcgaggcaaggagtcacaaagtcaggcaaggagggtcatggaaagcggggtgacagagggagaagtccggggcggtggctctcctctaaagcctgtacctagtcctcatctctctccagcctctttacaatgttcatccatggaaagtgaagcccagagaagttaagtaacttgcttaaggtcacacagcagcgttgacaaaaacaaacatacacaaaaaaataaatcacggccaggcacggtggctcacgcctgtaatcccaacattttggaaggctgacgcangaagatcanctgaggtcaggaggtggacaccngcatgg

SEQ ID NO: 9150 - DNA, 293 bp, Homo sapiens
  misc_feature (1)...(293): n = g, a, c or t
nggtaaatttgagtaatttcaaattccacaaacaaaactgaagaacagcaatatttngtttgaatttctctcttctgtacactcagtgatctaaaacaccacaatatccaacatacacaaacctnagggaagggttagtaaacacacacaagatnggaatcatggtgctctttgttcctgaatggaatggtcccacagaaaaagcacaggatacagcacancatangggcacctgttacatangaantgagcaaaacatactancatcttctatntncatnatggggaaacct

SEQ ID NO: 9151 - DNA, 96 bp, Homo sapiens
  misc_feature (1)...(96): n = g, a, c or t
ngncntgaggaagctcttcattggagggttgagctttgaaacaactgatgagagcctgangagccattttgagcactggggaacgctcncggactg

SEQ ID NO: 9152 - DNA, 263 bp, Homo sapiens
  misc_feature (1)...(263): n = g, a, c or t
nggtctgtgaaaaaagccatttccnaagattctggctgtgactcagtcactgacactgagcctgaggacgagaaggttgtttcctactngaagcancagaacctgccgacggtgacttcacctgggaacctgatggtggtgcagcccggaccgcattcgctgngggncaaaaaccactggctatnttattgtganatgtaagctgnatgacagggtggcgacncgaacgacagttttctcctgaggattntccctntgcaagg

SEQ ID NO: 9153 - DNA, 292 bp, Homo sapiens
  misc_feature (1)...(292): n = g, a, c or t
ccatgtccccagaattgaagccagagaatcgctcagatatccctgagggccggtcgttatcaaaaaagatgattaggacaggggcctggcctggcttctggtaataccagtgtacattgttactcccaatattgtttcccccacaggtaatcttggccgtctttcctggggccactgacactgagggtgtctgagtcaacacataggaggtcacagagtctgtgcagtgagagaggaggccgaggaggagaacggnccaggccatggctgaggcaccaccagtgctgcttcc

SEQ ID NO: 9154 - DNA, 306 bp, Homo sapiens
  misc_feature (1)...(306): n = g, a, c or t
gaaaaaataggacctattttttaagactttacagcctttgaaatggtttccacgtgattgttacnccagcagttctcgttttgtttgtttttcaatctcagtgaaatggctctttgctttcgagttctcacgcaacgtactgggcaaatgacaatcctcanccgctgntattttctaaggggtctcttcactttgatgagtgacatgaacaccgngtctccttctcttgngngtaccctaanccatatttccaancctgtggtactccaggattccangagtaagcctgtanaagagatttatttt

SEQ ID NO: 9155 - DNA, 510 bp, Homo sapiens
  misc_feature (1)...(510): n = g, a, c or t
cctactagacccctcttattaacctggggcaaacccatttggtaaaagatgactattgagtcttacccctacctgctccaggttagtacacaccaggcaacaggtggcattctaccctacccctttctggaggtggttctggacacctcaaaacctttgacatttgaattaacacgctaagacatctgcaaatgaacaatcagacaaagcattgctgggagttgggaattttggaaactctgttcacttaccaccaaatttattgaagccaccacggtcacttccgctggagaagacaagttagaagaaaggacatgaagcttccaacggctacaaaaggttgttttttgattttgtttaacattccccaaacatgggtaggtgtttttggaaaaagatacaagtggctactaaaanacatcccttcctgaccaccccttgtctgacctttgagcatgtcacacacacgtgtgcaatttctcannacncagtttataaanattttgcttt

SEQ ID NO: 9156 - DNA, 191 bp, Homo sapiens
  misc_feature (1)...(191): n = g, a, c or t
nggtctgaatcttcggtgattttctcgatgtcgctgttcttgcaggtcttctgcatggcctcctgcttgctgctttcaccattgctggtggatggcatctcatcactggcccatttagagaactcaggtgtgatgccgcgtgctgggagggccgccactggaggaaaggagggaggaaaaacaaagtgagg

SEQ ID NO: 9157 - DNA, 291 bp, Homo sapiens
  misc_feature (1)...(291): n = g, a, c or t
nggtaaaacaggagtgaagagagcagaaatctccaatgccatcgatcaatatgtgactggaaccattggcgaggatgaagatttgataaagnggaaggcactgtttgaggaagtccctgagttactcactgaggcagagaagaaggaatgggttgagaaactgactgaagtttctatcagctctgatgctttcttccctttccgagataacgtagacagagctaaaaggagtggcgtggccgtacattgcggctccctccggntctgctgctgacaaagttgtgattgagg

SEQ ID NO: 9158 - DNA, 643 bp, Homo sapiens
  misc_feature (1)...(643): n = g, a, c or t
aaatgatgccttgacttttgaattcaattctagaaccaattatcctaaactaaatcagagtattacaaatgaagatattccaacacaaagacttgtaggattttgtttagattgtcaatggttgattcatccaaattttcttcattgtcatccatggtgtgccagacttcagggaaaggagacggtatcagatgcagaactggaacacctcttcttaaaaatggaatatggtcatcctgaatcacacctccataactgtaattctggaaataccgcccctccaaagagtgatccttgagcaaacccaattcatgaagttcatgttcaattgcttgaagtctttcgaaccacctggctgagtttggaaaaaaantgggaaacgttgggtttggagctccaatcaaatccaataagaccaataaatccatgccatgcanttggctggtgcctctcgctccaggtgggtgcggggtcnatgccntctttcagctaagtgccagacccatagaggagaatcttgnncgagaccagngaacaaaagcctcttcnccctcaaagaagatcnacctggngtgaccaaatctggcttgggantctgaaacacgncctttaaggaanggaantttctttgtctaaggcacng

SEQ ID NO: 9159 - DNA, 318 bp, Homo sapiens
  misc_feature (1)...(318): n = g, a, c or t
gggnntgttctgggatagaaggcncnctgcannccaaaagggcaggaaggttncaatcctangncactgggacctttnctttctttntttcccaaaactccnggctggaacaaggaacttaaagttctcttttgccttgatggcttctcacanacatcttaaancacctgatgaaggatatgaanaganactacganatttagaaangaccnaggtcctctgataatatganccagttgtnangtaccttcagctgncgggcattccctctccacaggaacaggnggtntgatacaagggcaccacacggaggacctc

SEQ ID NO: 9160 - DNA, 591 bp, Homo sapiens
  misc_feature (1)...(591): n = g, a, c or t
naaagtancaggtttaggttttgctacattctcaaaagacagcaggagtatttgacacatctgtgatggagtatacaacaatgcattttaagagcaaatgcaacaaaacaaatctggactatggataaataatttgagagctgccacccacaaatataaatacagtactcatgctgactgaaataataagacatctacaaatttataaacaaaaagtgattgtcattatcctgcttatgtactagattcaggcaagcattatagactttttggttgcggtggcttttgcatttatattatcaatgccttgcaggaacgttgcattgataggcccattttatttttttattttttttttcgagacaggatctcactctgtagcacaggctggattgcagtgcaatcctgcaattctcaatcttgcactgcagcctcgacctcccaggctccagtgactctcccacctcagcctcctaagtagctgggagtacaggccgcaccaccacgcctagctgatttttgtattttttttgnanagacggggggtttgggacctgccccgggcgggccaaggggcgaaattcccagcac

SEQ ID NO: 9161 - DNA, 161 bp, Homo sapiens
ctacctgcgctggccgaatctctgcttttaggagctcactcctcataggtagagttgacaataagcacacaaacaagtgagatagcagggcagccggaccacccagttgggcaattcgtggcttggcctaggaacgttacatttgactgaggctggcgagg

SEQ ID NO: 9162 - DNA, 587 bp, Homo sapiens
  misc_feature (1)...(587): n = g, a, c or t
nctgcaaataatcagaagccaaggccaggccatcgatttgacactgcaggcagatgaggtcttgggatgcctcttgcgttcccccttctgtgggagcaggtgccttcccaacctcagcactcagtcccaatctctcttccactctcctgggttcaaacaggaacctctctgttggcacgaagcttttgaggggagcaggtctaacaagaaggaaaaaggggggttattagcacggaagccccaccctgccaccaggttggctggggacagggaccaatccaccaggctcgggaggcttggggtggggcagggaagtcttcctccatccctcaaatttagggaaccactgggagccccagactcaggctgaaaatgtctttctgcaaatataaaactctttttaatgaatttgcctaatttctcagagaccctgggctggagaaccagtgcaatgtcacacgggagaggaaggactgtcctgtttattgggagggangagggggatgctggtgcancctgctcaggagtcacccagggtctgagggctgacttgcagctctgggccagaccttgcccggggcggccgg

SEQ ID NO: 9163 - DNA, 578 bp, Homo sapiens
  misc_feature (1)...(578): n = g, a, c or t
ctggtggttaacaagtggatcgtcatgttcagtagtttatacattatgtgagaagtaacgttctgattctttttcttacacagaattggcagagggggtcgatttgggaggaaaggtgtggctataaactttgttactgaagaagacaagaggattcctcgtgacattgagactttctacaatactacagtggaggagatgcccatgaatgtggctgaccttatttaattcctgggatgagagttttggatgcagtgctcgctgttgctgaataggcgatcacaacgtgcattgtgcttctttctttgggaatatttgaatcttgtctcaatgctcataacggatcagaaatacagattttgatagcagagcgacgttagtcgtgagctcttgtgaggaaagtcattggctttatcctctttanagttagactgttggggtgggnataaaagatggggtctgtaaaatctttctttcttagaaatttatttcctagttctgtacaaatggttgtattagatgtctctatcatttaataatatacttgtgggactaaaagatataagtgcctgtataaa

SEQ ID NO: 9164 - DNA, 344 bp, Homo sapiens
aaaggagtgcttatttgcctaaatggctgttgacatacttaatagttttgtatctgattctagtatgctaaagcatttcagtattatgagaatacaatttacacactggatccccttgtacttattctttcagttgtcaaaatgttaccattattgctgggattctaagaaatctctacaaatgcctctgatgacatcagaaacaattggttctaatcctgtgaactctcttgtgaagaaagcatgagactccttcggtttagaagccatatctttcaggtcatccagaggtgcccaagccacaccaacagagaagatagtgattcctgcatcatgtgcagcag

SEQ ID NO: 9165 - DNA, 352 bp, Homo sapiens
  misc_feature (1)...(352): n = g, a, c or t
ncctggcaccaggctgcctgtctttggttttacttccttgtcactttttcttaaaagaggtactgagtataaaacaatataaaacaatatgagagggtctctctctcttccctcatttcccccctttgagactctcagtttttattaggtgggagttctgagtcttatttttgctacttatgtctttttgtgcaatagattgatagtgatgtatatagtatgcttctgctaaagcattttggtgaactaaggtcgngacaaagttttttatcatttggagaaatacaggtatcagacaaaggagcagtaagcaggtttctattactattattactcttattataagagtttt

SEQ ID NO: 9166 - DNA, 511 bp, Homo sapiens
  misc_feature (1)...(511): n = g, a, c or t
nnaaatcccagtttcagggaacaggactcaggtgggagccacgcctaaaagccttccacagagagagtgtggttaagcgcataggcgtcgctatcctcttcctccaaaagcagcttgtcgatggtcaacgagctggcggctcttctggggtcttccatgtcctgaaggactggctctgggatagagatggggagctggacaaactggggcccangtagggctggggccggaggctggtactgcagggtggaggtgggtagtgtggaaaggggctgaggccacnggaaataggtgaggggtgcccggtgctctgggccctccagcgggggccccactgcgggcgtggcggaccttcttgtctgtgacaggaaaacaccgtgacagagggttagcanccccaggagacccatccacccntccttgcccttagagggggcctccatctcccccttcaattntgcccttttctggtttctcacttcatggggcttcacctcctcctgnttaaaag

SEQ ID NO: 9167 - DNA, 371 bp, Homo sapiens
  misc_feature (1)...(371): n = g, a, c or t
aaggaccncgggaaggatatggaggcttcaggggacagngggaaggcagcncaggcttcaggggacagcgggacggaaacagaagattcagaggacagcgggaaggcaccagaggcccgagaggacagcgatcangaggtggcaacaaaagtaacagatcccaaaacaaaggccanaagcggagtttcagnaaagcatttggncaatanntagaaatagaagatttatatagcaaaaagagaatgatgttnggnaatatagaactgaacattatttttcatgcaaagntaaaagcacattgngcctccttttgaccacttgccaagtccctgnctctttcanacacanacaagcttcatttacctcngccg

SEQ ID NO: 9168 - DNA, 425 bp, Homo sapiens
  misc_feature (1)...(425): n = g, a, c or t
naaacttctgtttgccagctctgtcttcagtaccaggcacttccttgggacttccttctttgtatgggggcctgataagccactccagacaaggggctgttctttatgacttgggaggaatcagcaattctanaaggagtcattgcctttggtgctttagtttgttctattacttcttttctaggacagagccacatattcagggaatctttatgcttctcagactcaggtttgggttccacaggcatcccatttttatcctttccttctttcttcagaagccacttatacagagcctccttctcacaattctcatcacacacacactctgcaaagcttgtgcagggctcattggctctgcacacctcctctaccttacatgggtcctgatggttctggacaagccaatcctctgtaacacctgc

SEQ ID NO: 9169 - DNA, 330 bp, Homo sapiens
aaaagaggtatgagggctgggcgtggtggcttatgtttgtaatcccagctacttgggaggctgaggttgcagccaagattgcgccactgcactacagcctgggcgacagagcaagactctcaaaaggaggcatgaaatgcacctcaatcttttgccccaagtctgccaaagattgtcaaaccctccctgttaaaaaaaaaatcaagtttacctactctcccttctatataaaggaccctaaaattaaaatgtcaatgcccaaaatgccgaagtgcagatcgtcttctctccaaataagagttacttggaatccttaacaaatccaaggga

SEQ ID NO: 9170 - DNA, 397 bp, Homo sapiens
  misc_feature (1)...(397): n = g, a, c or t
nnaatgatgtgaaagcattngttccattcaaaggcccctatgcctttgaatgacatattctcagtaacttctttgccagtaactagagtatgtgagactgagtaactataatgtgcatatttcaagaattagcttcccgctgcattataacacatttcctaggaaagcctttgtatttttcatagccttttcacatatccctcatttaagaagtcacagtgttgcagttttactttgtttcagaggggaaggccatcttgttggcataagggggacagaagatataatatactctacactccggnctcttccctacaacctaaaagggagaggagttgaggccgatgggctaggactaggctttttggtaggcacattatagaagactgggtaaaga

SEQ ID NO: 9171 - DNA, 354 bp, Homo sapiens
  misc_feature (1)...(354): n = g, a, c or t
ctgtttatccaagcttgagctcttgccaagatgtggtttgtgaattccgaactctgtggnctgctctgaaggagctgtcacagatgcctggggtgcttgcagcctgaaatcacacaggccctcccccagtaccaacctatctgcctcgccactgggcccctttcccctctcaggacaggggactaccaagcccaaggacaaagctcctatgtccagagttgacgactttgctgtctctccatcatcttcaacctgatctccgtcatcttcaacctgatctattctttcatcatccgatgcgacttcaggaatggaaggaaggcttaagttcanatcggccatgattggagattt

SEQ ID NO: 9172 - DNA, 271 bp, Homo sapiens
  misc_feature (1)...(271): n = g, a, c or t
ntgtggnttanctggctttgctggtcgtaatggaggacaaaagtgccttctggtgaaactcagcttccatagtgatggaacctaagggtagcagagtttatggtgaccctgtagtgtatctccagaaatggtgatcgtttgaatgcatgtaagacattccctagggactccaagaaatattgattacaggaagatgtggtgctttgaaagggacttggtgttcctacatgaaccaagtgaaggcctagaattggcaacattcagaacctcg

SEQ ID NO: 9173 - DNA, 342 bp, Homo sapiens
  misc_feature (1)...(342): n = g, a, c or t
naaagaaacagatttcagaattaaaaatcaaaaaccaacaattggatttggaaaatacagaacttagccaaaagaactctcaaaaccaggaaaaactgcaagaacttaatcaacgtctaacagaaatgctatgccagaaggaaaaagagccaggaaacagtgcattggaggaacgggaacaagagaagtttaatctgaaagaagaactggaacgttgtaaagtgcagtcctccactttagcgtcttctctggaggcggagctctctgaagttaaaatacagacccatattgtgcaacaggaaaaccacccttctcaaagatgaactggagaaaatgaaacag

SEQ ID NO: 9174 - DNA, 372 bp, Homo sapiens
  misc_feature (1)...(372): n = g, a, c or t
naaaagtttccctagcgggccattccttagcaaaatgttggaatccctgttgctacattgactaaaaggtcatgatgaatggaatatgtaagacttggctcatagaaacctaatcagatggttagaggtgttggcagtttaggacctgctgtcataaatgngngaacaaccttttgtaacctaacctattgacctgcatgttttttctttaccccaattcattacatggaggctcaatcttgagtttgctttactggttcagcaaaagccaggaagaacaactttgtagtaatcaaaatgntatccaactgtatattgnttactttattgtaaatactgaacagtggttaataaatagttatatatttcttt

SEQ ID NO: 9175 - DNA, 354 bp, Homo sapiens
ctgaggcagacacccctttccggatctgaaacccagggcagcgctggatggagtcagtgtgccccactgcccccctgctcaccagcagtgcagcagggaccaggtcagtctaatcatcttaagccccgaattcagcacagagcccagaaccccctggggctcagaacctactggctaagatggacacgccttccccaggcttacccggtaaaggccagcagggacgtgcactgaatagatggcgtcgtcctctagctcagtgctgtggaaaggctgcagccgcgtagtgagctcgtccccaggggggcccccaaagggcttcagggcaagagccaggttcatacatggaaaagg

SEQ ID NO: 9176 - DNA, 338 bp, Homo sapiens
aaaagaaataaccatttgtttcagattaaattgaccattctatttttcagtcagcattctcaccaccaaatggcacctatcccctttaccctgtgttccttttgctttttgccgtaactcttattgtcctccaataaactgtgtaatctatcatatccatctccccttgctagaatataagctccatgagggtgggataatttggttttttgctcaataacaattgtcccatttatgtctttatcttttaagactattcatcttcaaataagacataaataaggttttattatagcaatatgctataatttttaagtgacaactcaagcacttgtttt

SEQ ID NO: 9177 - DNA, 461 bp, Homo sapiens
  misc_feature (1)...(461): n = g, a, c or t
tgcaaatccatgtctaaggtgcatggttgtgttcacttaacaattacgcaccttgactgtccaaatgtgagagtcttatggagtgggcactccctgctggaagggaaaggtgagactgaggtatgtgganaggaccctccttttctagtgcataggatcccagacgattataatcacacacaacatgccaagaaaaggggactgcgttatcagcancccttctgtatactgcaaatggagggtganaaggnngaactttgtttaattaggatgaaccatgtggngattacatacattaatgtccaagggacattgttgtggtcaattaaaaccatgtactttggacaaatataagaatcttaaaaagtagngggnactccttgttgaaaaagcaaaagggagnccatgagaaggtgcccttatctagtacacaangaatatanacnagccaagcaaagagg

SEQ ID NO: 9178 - DNA, 357 bp, Homo sapiens
  misc_feature (1)...(357): n = g, a, c or t
aaaagcttgncagagttgcacaaatctaactggtattttgtttttgtttttaggaggagatgttaaggtaacccatcttgcaggacgacattgaagattggtcttctgttgatctaagatgattattttgtaaaagactttctagtgtacaagacaccattgtgtccaactgtatatagctgccaattagttttctttgnttttactttgtcctttgctatctgtgttatgactcaatgtggatttgtttatacacattttatttgtatcatttcatgttaaacctcaaataaatgcttccttatgtgattgcttttctgcgtcaggtactacatagctctgtaaaaaatgtaattt

SEQ ID NO: 9179 - DNA, 435 bp, Homo sapiens
  misc_feature (1)...(435): n = g, a, c or t
nctgaggaatgacgcaggggcctgcaggcagctcacgcggagacaggtctgtggggccccgcgtcagaacccacttcacatcccaaagccccacctgctttgatcttcaatgctgggctcaatgtcagatctggctgaccagaggggctcaatgaggctcactggctcttcatgcaccctgctgtggcctgagcacgtccccccaaaacccacctgcttaagtcctcacctgcaaggggatggtattaggtggggcatttgggaggtcatccggtcacagggcaggggcacagcctcatcatgggaccatcaccctcacaaaagaggttgcatctactggtgctttcatcttgggcttccagcctccaaaactgaaactgatttctgttgtttataagccactaggtttacaatattttcttttttttttttgaa

SEQ ID NO: 9180 - DNA, 218 bp, Homo sapiens
  misc_feature (1)...(218): n = g, a, c or t
ccaaagtgggcagattgcttgcgctctggagctcgagaccagcctgggcaacatggngaaaccctgtctctaccaaggatgcaaaaaaaaagctgggcatggngggtgcatgcttgtcccanctactgaggaggctgaggtgggaggatcccttgancctgggaggtggagggtgcngtgagctgaaatggcaccactgcaatccaaggggggngaca

SEQ ID NO: 9181 - DNA, 157 bp, Homo sapiens
  misc_feature (1)...(157): n = g, a, c or t
caacctttttcgcgtacctggggnggaaactgctggcccaancaaatnactttgagcnatactnatgnagagggaccatcttaagggntntactgtcctgcnctaagacatggangggancagnngggccatcatcaaagnnttttactccatcttg

SEQ ID NO: 9182 - DNA, 167 bp, Homo sapiens
  misc_feature (1)...(167): n = g, a, c or t
aaaaacaaactacataaacagatctttcctataacctangaaagnggaatgncagaagncaacaaaatgtgataaacttaaagngctaaaacagaaggcncttcacaaantctgttcactgaaacagttatatatcctcgcttacatccttcactttacaannggca

SEQ ID NO: 9183 - DNA, 224 bp, Homo sapiens
aaaatttatcagtatagcatttcatttctatgcatgtatatgtatagtaattcataaaactaaatagcaaactgatattctacaccagttcatttatctcaatatatattttggaatataacggcaatattaaaaatatcaattccctctaagctgataatactataagattttacacaaagttaaagtttttgttttttctttttgaaaaagtttcattgttt

SEQ ID NO: 9184 - DNA, 345 bp, Homo sapiens
  misc_feature (1)...(345): n = g, a, c or t
naaaaatatgtactgtttccttttttgttgnttttntgnctgttattttttcttttgncctganctcancatagactaatactaccttaatgttaaaatctgaatttcttttaccattttgcttaaaagcaatatgctatttgcttattccgngccctgacatagataatttttgaattctgatanaatacaagtgtggtaaatgccatgtttgtactttatctaacatcttctctttcancaggcttgnnttttttatatcatgagattgtttgtgtgtcccctttcctctnctttgcttaacacaattatcttgngntgaaggatcctccacnatttcatgga

SEQ ID NO: 9185 - DNA, 306 bp, Homo sapiens
  misc_feature (1)...(306): n = g, a, c or t
aaactaagcaaaggtacacgttgtaacggtggggcatctgtgaaaaagatgtccctttcataatatatgcaatatattccagatgttttgagagattacagaagaggaggcctgcttcacttgcagataagtttattataattctccanaaatgtgcaggatgtgcattagcaaattgcactgtacttttcactccagcctgggtgacagagcaagactcccgtctcgggggcttaaaaaaaaaaaaatgctgtntctaaatgaatntgngnaattgggcccaaatgngggtttgctcagtattag

SEQ ID NO: 9186 - DNA, 189 bp, Homo sapiens
  misc_feature (1)...(189): n = g, a, c or t
ggaaagtgtaaatttatttaataccaaatgtttcctaagtttactttttgcacaatgcacagacacttttgggacaatgtatggttaaaaactaatattctaccaacagctccatgctgctctagnatcatcctgaagggacaaaagtaatggcagaaggatgnctggggtctccaaagtcccaggaac

SEQ ID NO: 9187 - DNA, 257 bp, Homo sapiens
  misc_feature (1)...(257): n = g, a, c or t
ctgagaattaactactgacagtatccagcacttctggaacacgcggtacagcctntttggctaatagttctgcanaattgaagtctggctcataagtgacactcttagaggagctgcaggaacagctacaggtttctgtganatcattaaaatctccaagctctaaaataacaaattcatcaacatcgcatttgcagaatctctttnacatcatggcaaggacgtgtttcagtnactgggctgacctgtaacacagc

SEQ ID NO: 9188 - DNA, 295 bp, Homo sapiens
  misc_feature (1)...(295): n = g, a, c or t
ctgcacgggggaggtgaagcagaaactcgctgagcctcaaggaatgtgaaactagcaagtacagataaggctcaaatgtattacatgaatcattatcaatctgtcttgcaggaagacctaggtagngaagatgaaagtgagaactcccactaataagtgagattctcaaaggggggaatgaggaaggagaccacctctcttattgtttcatacctcagaaaaagaaggaagaaataaaagttaaagaaggcaaaaatgagataaatagtcaggcagcctggccccgcaccccagg

SEQ ID NO: 9189 - DNA, 225 bp, Homo sapiens
  misc_feature (1)...(225): n = g, a, c or t
nggtaaaatcatttatataaagtcattaggatcatttaggaaagagaggatggaaactaacatttattaaaaactaactataccaggtaccttattacattattttatttaatcatcatgtatccctataagnaagtattcttctcttttatagcagtaaggaaatctgagcatgtcaggcaatatctaatgttgcnccaggnatcatccgcaagctgggcaatg

SEQ ID NO: 9190 - DNA, 373 bp, Homo sapiens
  misc_feature (1)...(373): n = g, a, c or t
aaataaaattacnagctgnaaggaaaatgaaaagccacaaatgcaagactgttcttaaatggaaggcatagtcagcgagggtaaatcctataccactttaggaagtattaaaaatatttttannatttgaaatanatttcatanaagncctctattcaaaatcatattccacagatgttccccttcaaagggaaaacatttggggttctaaacagttatgaaagtaagtgatttttacatgattccanaataacacttgtattgaccaatttagacagataccacgaccaattttgcatttaagaaattgttctgattatttacgtcnactcattagaantcagngaaangtcacagtcttttgtcacagaga

SEQ ID NO: 9191 - DNA, 271 bp, Homo sapiens
aaacaaataaaaggtcttggggaattctgtttggctacctgggcacgccagtctgcaccatgtgtccctgcggcgcatgagtgactggcgtatttagcccgtcacatttcattcgctgaaggaaaggcaagagagttgaaacatttttcttacttaaaaaaaatgatctttgtgaagaacatagtgagttcgtttgtcttcagtcaacagcggctgaaactgaccactgagaaatgggtgtgggcactgacagttctcccccattatttgg

SEQ ID NO: 9192 - DNA, 477 bp, Homo sapiens
  misc_feature (1)...(477): n = g, a, c or t
aaagtgatcaggttcattttattgactacacagaagcaattccattttccactaacaaaataatttaggatgaagaattctgactcagtgtctccacaggaacctgttcctcagctttctggatgtcattgtttctgacatcacaccttcctagacaggtatttctggaaaaggatctggtaagaggatgaatttggctctaaacaaatgcccatggccccggaagacctgttggggccaccgagttagtttctctggcaaaatttgattccttccatctcaccactatagtaactgttgttgttatgttaccaggagccacacaaaggttgacccatcaaggnggagccaccgttaccaggagccacacgaangcttgaaccagcaaagtggaggaccanacctgcccgggccggcgcgntcaagggccgaaattccangcacactggcgggncgttactagnggatcccgagntc

SEQ ID NO: 9193 - DNA, 262 bp, Homo sapiens
  misc_feature (1)...(262): n = g, a, c or t
ggggaaatggcattcttggcaaagagaacagcatgtgcagaccaggagcaggagcaaggaggggctgacagatggtggcactagggacgttggcagggtcagactgtgccagccttgaaggccaggggagaccctgggactgtggcgtggtcatgggaaaccaccactgacagttntggagcaagggcangatttggntttaggaaacncactttctctggnaagacctacaggtttaacggtccntccttcctcattgnaa

SEQ ID NO: 9194 - DNA, 146 bp, Homo sapiens
  misc_feature (1)...(146): n = g, a, c or t
gnaacacccaacagnaacctctgntgttactctttgactaaaataattattttagntaaaaaaaaaaaaaanaanaaanaaanaaaccaggtaacnctatncaaaaggaagcngngnaagatctgaaacaaaattttctcttttnc

SEQ ID NO: 9195 - DNA, 347 bp, Homo sapiens
  misc_feature (1)...(347): n = g, a, c or t
nggtctggtctccctccaccctctcatatttacacccaaccccttccccaaagctagcttttaccaaagttcctggtaggaggtcaagaagtgtgtccacttagccagcagtcctagatgtagtggacgctgtttgtccccaggccagttgggcaccaggaggggctactctggggattcagggcatagacttcgtactggggtcaagggaggcccccactcacagatactctcctttccttctggggctcaatgtacaccaaaaccttcagaaagcaaagttggagtggtggacccccaatgtcaagtttagtgctctctttgcttgtgaggacccacacaagtgg

SEQ ID NO: 9196 - DNA, 364 bp, Homo sapiens
  misc_feature (1)...(364): n = g, a, c or t
ntgancgtgaagcacaccccgaagttggagatcaaggtcactcccagtgatgccatagtgagggagggggactctgtgaccatgacctgcgaggtcagcagcagcaacccggagtacacgacggtatcctggctcaaggatgggacctcgctgaagaagcagaatacattcacgctaaacctgcgcgaagtgaccaaggaccagagtgggaagtactgctgtcaggtctccaatgacgtgggcccgggaaggtcggaagaagtgttcctgcaagtgcagtatgccccggaaccttccacggntcagatcctccactcaccggctgtggagggaagncaagncgagtttctttgcatgtcactgg

SEQ ID NO: 9197 - DNA, 373 bp, Homo sapiens
  misc_feature (1)...(373): n = g, a, c or t
ctgtancttctgtgggacttccactgctcaggcgtcaggctcagatagctgctggccgcgtacttgttgttgctttgtttggagggtgtggtggtctccactcccgccttgacggggctgctatctgccttccaggccactgtcacggctcccgggtagaagtcacttatgagacacaccagtgtggccttgttggcttgaagctcctcagaggagggcgggaacagagtgaccgagggggcagccttgggctgacctaggacggccagtttggtccctccgccgaagacgacatggtcattattacgatcccacacttgacagtaatagttggcctcatcgccggcttcgaccctgttgatggtcagggtgg

SEQ ID NO: 9198 - DNA, 364 bp, Homo sapiens
aaggcccttttctccaaaaaattcattccactttcatcttctgaatcggagttggaatcagtcacagaattctctgagggctggcgggactctgcttttttgttggttgctcccctggtactccgcgctggaaacttcatcgccaccctgagaggtccagagtgcctgcactggctgcgggtcctacagccttcccgaactgactgcagcctcgtgtttgcaaaattatcagaagcaaagctgtcacaactgtcatcagaggatgacgaggtttccatggaaatcaacttcacatatctgaatttctttaagttcttctttactctgagatctttctgcggcacgcggcgagcgtccatgctgg

SEQ ID NO: 9199 - DNA, 273 bp, Homo sapiens
aaaaatctctctcgtgggtaaagtcactttccccttggcatctgacttcagcaccatctgggccctacagaaactgaggccagtggaggaaatggctctggacaaagggctgctgcttggatgtggccccagcgatggtcagtctgagatcgacactcctagagtccaccaatctctctctggaggcttctgaggttgatccccatactccccacaccaggtctacaactccataataatggctaaaaattatttcttatttatttgaaattt

SEQ ID NO: 9200 - DNA, 126 bp, Homo sapiens
  misc_feature (1)...(126): n = g, a, c or t
ctgtagcttctgtgggacttccactgctcaggcntnaggctcanatanctgctggccgngtacttgttgttgctttgnttggagggtgtggnggtctncactcccnccttgncggggctgctatct

SEQ ID NO: 9201 - DNA, 415 bp, Homo sapiens
cctcatccggctttgacccaccatccgttgcagaagcctccaggagcagcaatcctaagagtgggaggcagccaagacccccttccttcaaaacctcccggaagtggtttcaggccctctagttgccatgaccaatttgtgtgtgtgtttaatttttgcttcaagctctgtagcaggacctgccccacgcacacccctacccctctgtgaggagctgtgggaagtgtgggtttgtctccagaacagaagagaatgatggatattctggctctggggccctctccaccaccactcacagtagccttgctgaagccatcacagatgggagaaggccatgccagccacgtccgccgaggggcgccagcctgaagctgccaggccctgaggttcagaccctggaccccatagctggagg

SEQ ID NO: 9202 - DNA, 371 bp, Homo sapiens
cctccttgaggatgaggctgattatgtggtccccgtggaagataatgatgaaaactatattcatcccacagaaagcagttcacctccacctgaaaaaggtaagagtttgtcgccttaagcacctgaaaatttttagcagttgatcaggatgtataagagtatttggtagtaagcactaagaggctcagaaatgacagtgcccaggactttctcccctgggccacagtgtgtgcttctttggctggttgggcagacagcatcagtgacaacccatctctgtgtatcatagcccttccctgccttccccttcctcttccatgctttaatcttcccatctcacattatgaaagcacctgggtagttctcttcag

SEQ ID NO: 9203 - DNA, 360 bp, Homo sapiens
ctgatgtcacagtgcagacatccaccgttccaccacagaaccagtggctgagcggaccaacgttgccatgtgcgtttgctctgtggggaacagagcacagagggtgagcgacatgtgcagaacggccccttggctgcagttaggacctcagtggctggtatggccgagctgctagaagatgctgctgtccctgtgatcccagcagccctcccttcaccgtgacccctgacctttgtcaggaaggtgcagtttttcttctcaatctaaatgcctttcaggtgggccgcttccttggctacctggttccagggggctgttttgtaatgagatgctgctggcaggccactcagaggctcccag

SEQ ID NO: 9204 - DNA, 606 bp, Homo sapiens
  misc_feature (1)...(606): n = g, a, c or t
aaattttgagacagtataaggaaaatctggttggtgtcttacaagtgagctgacaccattttttattctgtgtatttagaatgaagtcttgaaaaaaactttataaagacatctttaatcattgcaaaaaaaaaaaaaaaaaaaaaaaaaaaacctgcctgggcggccgcccgggcaggtccttgcctcanatccaaggtcactcggaagaggccatgcctaccctcaatgacactcatggaggaaatgctgagagaagcattcagatgcatgacacaaggtaagactgccaaaaatcttgttcttgctctcctcattttgttatttgttttatttttaggagttttgagagcaaaatgacaacacccagaaattcagtaaatgggactttcccggcagagccaatgaaaggccctattgctatgcaatctggtccaaaaccactcttcaggaggatgtcttcactggtgggccccacgcaaagcttcttcatgagggaatctaagactttgggggctgtccanattatgaatgggctcttccacattgccctggggggtcttctgatgatcccagcagggatctatgcncccatctgngtgactg

SEQ ID NO: 9205 - DNA, 216 bp, Homo sapiens; identical to SEQ ID NO: 3766

SEQ ID NO: 9206 - DNA, 367 bp, Homo sapiens; identical to SEQ ID NO: 144

SEQ ID NO: 9207 - DNA, 408 bp, Homo sapiens
aaattggaaaattgaaatcccaagtgggcaagcaagggctccagcctagcactcccttttctctcccacatagcatgagggagagtggaaaggtaggagtgggtgggaaagtgttgcacccagcctttccactccaaacctcgtattgctttcttgaggttggtggtgaccaggatgtatcattttaggtcatgtccaaagtaatggagatgttccagcctagtgcggtggtcttacagtgtggctcagactccctatctggggatcggttaggttgcttcaatctaactatcaaaggacacgccaagtgtgtggaatttgtcaagagctttaacctgcctatgctgatgctgggaggcggtggttacaccattcgtaacgttgcccggtgctggacatatgagacag

SEQ ID NO: 9208 - DNA, 248 bp, Homo sapiens
ccaaagaagcagcggcttgggccttcacccagtgggcccttctctgtgatatagtcaaagagatcctgggcgggcaaaggccgctcgaggaccagcatgaagccctcctgtgtctcaaaccagtcaagcaggcggatcacgccagggtgcccaccacctgcacccactttccatagcagtgcgacttcgagtgggcatgtgactgagtctgacaagggggaccagcccagcacacgattccggggaat

SEQ ID NO: 9209 - DNA, 90 bp, Homo sapiens; identical to SEQ ID NO: 145
  misc_feature (1)...(90): n = g, a, c or t

SEQ ID NO: 9210 - DNA, 343 bp, Homo sapiens
  misc_feature (1)...(343): n = g, a, c or t
ctgtggatcctgattctggactggaacactctgcgcatgtcctggagaaaggtgggaaggtcttcagtgccacccttggcctggtggacatcgttaaaggaaccaactcctactacaagctgcagcttctggaggacgacaaggaaaacaggtattggatattcaggtcctggggccgtgtgggtacggtgatcggtagcaacaaactggaacagatgccgtccaaggaggatgccattgagnacttcatgaaattatatgaagaaaaaaccgggaacgcttggcactccaaaaatttcacgaagtatcccaaaaagttctaccccctggagattgactatgg

SEQ ID NO: 9211 - DNA, 291 bp, Homo sapiens; identical to SEQ ID NO: 146

SEQ ID NO: 9212 - DNA, 197 bp, Homo sapiens
ccattggttcccatgacaacgtgatctacatctatggtgtttccagtgatggtgccaaatccagccgctttggccgctgtatgggtcactccagcttcatcactcatcttgactggtccaaggatgggaatttcatcatgtccaattctggggactatgagattctttactgggacgtggctggaggctgcaagcag

SEQ ID NO: 9213 - DNA, 244 bp, Homo sapiens; identical to SEQ ID NO: 147

SEQ ID NO: 9214 - DNA, 91 bp, Homo sapiens
ccagtgaggaccggaggagccctgggggccagggagaccacggtcgcccttctcaccctgttcacccggaggaccgatgagcccgatcagg

SEQ ID NO: 9215 - DNA, 157 bp, Homo sapiens
ccacgctgctggcctgggctggcgtctcctgctgtgagctggctgaggaggacttcctggcggtctcccccttagatccgcgctatcgtgaggtccactatgtcctgctggatccttcctgcagtggctcgggtgagatggtatgccgagcagacag

SEQ ID NO: 9216 - DNA, 406 bp, Homo sapiens
cctctaaccttgagagtgtcattgccttgttacatagcatgatgtcttaccccagaagaaaaacagggaaatatagaaactcctaccctcccacatgcacagatttctgggtgatgcctccccaaggagtagagatagaagaagcagcaaagacaagggcagagacccagcaccactatgccacacacttgatgtcagataccaccaggaaagggaaaaatcacattccaaattacaaaggaaatggaaagatggaagaccgaagacacagattttgctgcagcaattccttggaacgtgagagcactctcttcgaaacctcttctctcattctctttggaagcccaaactgggttcttgagtttggggaagatttatggaacagatgatgcctaccattgccttt

SEQ ID NO: 9217 - DNA, 166 bp, Homo sapiens
cctggacgaggaaggctcctgacactcactaggactgtgactagatgttccagtggcagaaagtcctcctggtttccttcgggccctggcgtaatgcagcagagcagcagcagcagcaaggacgaggatgctgagcaccagccccgtgattcccgcagcggtaagg

SEQ ID NO: 9218 - DNA, 126 bp, Homo sapiens
cctcctcctttcgctcctgaagtcagaagcgccagcctttggctctcaaaattgggagcgatttggtggagaggatggggtagggaggatgggagaacagcgcctttatctgggacagacagaagg

SEQ ID NO: 9219 - DNA, 322 bp, Homo sapiens
  misc_feature (1)...(322): n = g, a, c or t
gatcgcgccaccacactccagcctgggcgacagagcgagactccatctcaaaaaaaaaaaaaaaatactgagtagcaaattcttaattccaagtaaagattaacacctttctattaaaaaaaaaaaaagatgaggagagaataaactatttcctattattattctagctgggtacacaggcntgcacttgtagtcccagttactgaggaggttgaagggggaggattgcttgagtctcggaagtcaaggctacagtgagctgtgatcatgtcactatactccagcctgggtgaaagagtgagatactgtctccaaaaaaaac

SEQ ID NO: 9220 - DNA, 291 bp, Homo sapiens
ccttcacaacctacgaaactacagtccagatttgggaaagcagccgaaaaaggtgcctaaacgtcgccaggccgcccgagagctgtccattcagcgccgttctgccctcaatgtgaggctcttcctcagagacttctgctctgagttcctggagaactgttacaaccggctcatgggatcagtagaggatcacctgcttcgggagaaagctcagcagcatgatgagacctattatatgtgggccttggctttcttcatggccttcaaccgagctgcctccttccggccagg

SEQ ID NO: 9221 - DNA, 340 bp, Homo sapiens
ctgccagactattcccacagtgctccaaatgcacatgaacaacagtgacggctccagccttcgacccagagccccgtgcccagtgcgtcagtgggcctggggttccaggctacatcaagcactgatggtgtcagggctggtagttaccaaatcagggttaagaaacatcagggccacatttcactaccttcacagatcaaactcagcagcagtcatgactgtctgtcactacactggggatcccaattccacataagcacttttggaagaaaacagccaaagttggcctaaaattggcgctggaatttgggctgggaaaaatcttgtggttatttccttt

SEQ ID NO: 9222 - DNA, 205 bp, Homo sapiens
  misc_feature (1)...(205): n = g, a, c or t
ctgatgcctcactactagatgcagtgctgggaccttcctcttttggagctgtcccatgtacagnggacccaagctcaggaccttcgtggagctgcttctccaacctgagaaactcaagacccatcctcccgctgtcactttggacaatggaaatctacattttcttttcccttttttttttttttganananagtctcgccctgt

SEQ ID NO: 9223 - DNA, 221 bp, Homo sapiens
ctggacttgtttgacgatgttggtactttcgcctctggacccccaaagtacaaggacaatcccttttccttaggggaaagctttggctcccgctgggatacagatgctgcctggggtatggacagggtagaggagaaggagccagaagtgaccatctcaagcatccggcctatttcagaaagagccacaaaccggagggaagtggagagccggagctcagg

SEQ ID NO: 9224 - DNA, 473 bp, Homo sapiens
ctgcagagcccaccccaggaggagcctgcctctccttacaaaggctgtaataagacagcacttgacgatgccatacgtgcgaaaagtgcagagcctcagagggtttacaacccccatccctttgtaactgtagtttgcttacactgtggattctaaagagacatgtaaatctggggccgatttcatctgtttaatgattactccccacccgatagagctattctatactgttgctaaaatttcattaagtctctcaagatgcattgatgagatgagacaccatgaataacacattcatcaactcaagtatggcaactgttcagagagcttcagagctttggtacccgagtgcagacttggtaattaccgggaatttgtctcccccgtataaattctggcgaacaacgagaaaacaccatctgtgatcgtttccacatcacgtttgctaacagagcacttctggagagcaatgg

SEQ ID NO: 9225 - DNA, 252 bp, Homo sapiens; identical to SEQ ID NO: 2678

SEQ ID NO: 9226 - DNA, 360 bp, Homo sapiens
ccttcggtccaattcaggccaccctctgttttcttggctcttgaggcttttgttggtttcaggcctgaggcttctatctatcttggaacatgggctttccatcttagtcctcgggtctcaagtctcaaaccatctgtcttatactttgggcctcctatccatatgagccttccaccttctgccctacttgagttctgggttttactgcagtctagggccttgttttggtcttggatcatctcacatggcagcctggcataaggaaccgctccacaatgcttgctctgatagccgacgttctgcacctatcaggcaggggttaggaagcccctctgccacacatgacacacacacacgtac

SEQ ID NO: 9227 - DNA, 302 bp, Homo sapiens
  misc_feature (1)...(302): n = g, a, c or t
ctccaacccttggaataatccgagtgctccatcttcagtgccatctggactcccaccaagtgcaacaccctccactgtgccttttggaccagcaccaacaggaatgtatccctccgtgcctcccaccggaccacctccaggacccccagcaccctttcctccttccggaccatcatgtcccccacctggtggnccttatccagccccaactgtgccgggccctggccccacagggccatatcctacaccaaatatgccctttccagagctacccagaccatatggtgcacccacagatccag

SEQ ID NO: 9228 - DNA, 311 bp, Homo sapiens
ctgaatatggaagagatctttttttactagagatctgcagaagaaacgcaatcttctgagcacaatatggaatctaaaggttttatcacttagttgttcatattatgaacctaaaaataatggcataaagtttggggatgccaggcatactttttcatgtttggtgttgagttattttacttttctaacccaacattccttggtgagaccattaaatccaaacacttgtcaccgttccttctcatagtcactctgggtcatcagcatgtcccagtcactgcagcaacgccttgtgtttgtttcattttttt

SEQ ID NO: 9229 - DNA, 228 bp, Homo sapiens; identical to SEQ ID NO: 329

SEQ ID NO: 9230 - DNA, 377 bp, Homo sapiens
aaaacaagcaaattttattaaaggaaaattttgcaggtttaaggtttgcaggtgaaattttgtaggtgaaaaggtttacttttcaccagtctgttctggcatgcttctaatgatgtcagagtcacctggatcaatgatagccagtgtgcacactctgtagtattttccgcatgctgtgcccagttcaatattattgccactgtagtgatggacaccagttttagccaacatagcatagtactctatttcagatttcctcaaagctgggcagttgttagcgagaatgaccaatttcgctttgccttgtctgatcatcttcagagtctgcttgtaccccaggacgtacttcccacttttcataacgagttggagcctag

SEQ ID NO: 9231 - DNA, 162 bp, Homo sapiens
  misc_feature (1)...(162): n = g, a, c or t
ctgggaacncacatgctatgtatgtcaccatgtgatcacaaccacagcacatgtgaagtgctacaattactcctnanagcggtggaatggcanangagcttgcatgaaaaatcagaacatacccgtacaccaaagcaattcaaaaggaccaagtnaccctca

SEQ ID NO: 9232 - DNA, 433 bp, Homo sapiens
cctggaagctcctacccaaccctcatttgtttcaactcactttcaatatgtgcatagttttataaagcagacatttccatgaggaaaagaggatggtggtgaaaggggaggggtgaagggacatctccaagtcacagaggctgcaaaactcagcatgacttgtggacggagccacaggccacccagggcaacaacacccacataactcaccaagtggttaacggctctaaaccagggtcaacaggagaggggacaaaagtcactccttgattttgctgcagcttaaagataagttctacctcagcttatgctagcccttatggggcaaaaaagggaaagtcattctccccaagtccaggctgggccgtcaaacagggagtggggtgtcagccccagacctcaatgaggtccccagattccatgcccaggtcag

SEQ ID NO: 9233 - DNA, 549 bp, Homo sapiens
ctggagcctgagtccgctgcacggagactctggtgtgggtcttgacgaggtggtcagtgaactcctgatagggagacttggtgaatacagtctccttccagaggtcgggggtcaggtagctgtgggtcttagaaatggcatcaaaggtggccttggctgcaaaacaaaagaaccccaggagggtcagtggcgtgcttgaggcaagtcccccaacccaaaaattgtcgcactcctaggaacagagaggccattctgggcgggtctgtcgtgcattaggagagcctttctctgcctccctgaaaacacgccaagcacacactggacccgtgtggttaagcggagctgagagaccatggctatgccccatgtgtggaccacctaccgaagttgcccagggtggcagtgcagccccgggctgaggtgtagcagtcatcgataccagccatcatgagcagcttcttaggcacaggtgcggagacgatgccagtgcccctgggtgcagggatgaggcgtaccagcacagagccgcagcggcctgtcaccttgcaa

SEQ ID NO: 9234 - DNA, 561 bp, Homo sapiens
aaatcctattatcaaaatttgggggggtgatgattaagtaaggtaatgtatataaacatgtagtgcagtgtctggcacatagtaaacaaattttttattgacagatattataacataaataagttttacctgatggccttccttgataatctattcgctctcctcgccagtactccaaaggtttcaaacgtgttctcttggtcctgcgaacatttggtgtgttggagggcaatactagtttgtgatggattctgttctttggtatcactttagattgttttgagtcatctgaacttccatgaacttcctcatcatccacatcattctttccagacattaaataattattattgagcctggaaggtccactttcctctaaaactgaagtcttatgctctccagaatccaagtttgactctgttggtatattacatgtatatccactggtctgaggctttaggggaacattctgtgcagtcataatgttatcttcattctttgagcttcttgtagatctagaacaatcaagatttttcttcttagccaagtctgcctcatcac

SEQ ID NO: 9235 - DNA, 58 bp, Homo sapiens
aatcaataaagcttgccttaaattatttttatatgactgttggtctctaggtagcctt

SEQ ID NO: 9236 - DNA, 254 bp, Homo sapiens
atcaaacaaaagtcactgaggaagaaaataagggttcaggtacaggtgcagccggtgcctcagacacaacaataaaacccaatcctgaaaacactgggcccacattagaatgggataactatgatttaagggaagatgctttggatgataatgttagtagtagctcagtacatgattctccgttggcaagtagccctgtgagaaaaaatattttccgctttgatgagtcaacaacaggatttaacttcagtttt

SEQ ID NO: 9237 - DNA, 291 bp, Homo sapiens
ctgcttttatacccccttgccccgccaacgtagttaagagaacagcagcataagcggctggcagaggcaaggaaagaccagtagagagaaaaaaaggccatctataccaattctaagttaatttagactaaacaaggtcttaatagcaaaggataattgaaatcccaaacttacaaggttttcaacaaaagtgaagtttgcttaaagttaacagtgtaacatgtattatggtaacttctaatcttgtggccttagacagtctagtccaaaggcataaagaaagtttgcttt

SEQ ID NO: 9238 - DNA, 513 bp, Homo sapiens; identical to SEQ ID NO: 148

SEQ ID NO: 9239 - DNA, 319 bp, Homo sapiens
cctgcctgctgtagtttatttcttttgccttgttcagtgaatttacccagagggtggctgagattgaggctttgggagccccaagaagctgcttggttttaatgtgctaccttatagctgagcctgttgtgctcagggcaagtagtaggatgttccccctgggatgtgcaaggttctctcaagcagacatgagcctccatcactcccaccactccctgcaactcagcctcctcttctcagcctgtgccttcctccagttctagtaaacactgccaaatgaatatagttctccgactcttctctgggggttcattggcag

SEQ ID NO: 9240 - DNA, 216 bp, Homo sapiens
cctgtgtgtcctgctcagccactctgtcgaccacactgacccaggggctgccccggacatagaagcggaggggtttccgggcccactcccctgcatggccgacgcccacccgggctgctgccactacagccggctcactgggctccaggggaccacgctccagccatacagcttcatcctgtgccaggtccctctggtcaaagctcttgttgatgg

SEQ ID NO: 9241 - DNA, 223 bp, Homo sapiens
ctgagggtacagctctgagaattggcgctggaaacagttcttggactgtgatagccacaacagatgctgtttctgggatcccaggaccagggctctggaagatgccactgcagtggtagtgcccgctgtctgccttttgtaccacggtgatggagaattccctgttaggcccggggggacccagagctgagccatctcggtagaaggtcacctgagtcagtgg

SEQ ID NO: 9242 - DNA, 359 bp, Homo sapiens
  misc_feature (1)...(359): n = g, a, c or t
ctggcttctggcccctgcttcacgcccccagcgccgncgnccnttcctgagtggagatgaggatcccaaggcttccacgctacgtgttgnggtctttggctccgatcggatttcagggaaggtggctcgggcgtacagcaaccttcggcggctggagaacaatcgcccactcctcacacggttcttcaaacttcagttcttctacgtgcctgtgaagcgaantcatgggaccagccctggtgcctgtccaccccctcggagccagacgccctcacccccgacagactcccctaggcacgccagccctggagagctgggcaccaccccatgggaggagagcaccaatgacatctcccact

SEQ ID NO: 9243 - DNA, 306 bp, Homo sapiens
aaaaactggcccttacctgacagagccctggctttgacctgctcagccctgtgtgttaatcctctagtagccaattaactactctggggtggcaggttccagagaatgcagtagaccttttgccactcatctgtgttttacttgagacatgtaaatatgatagggaaggaactgaatttctccattcatatttataaccattctagttttatcttccttggctttaagagtgtgccatggaaagtgataagaaatgaacttctaggctaagcaaaaagatgctggagatatttgatactctcattt

SEQ ID NO: 9244 - DNA, 373 bp, Homo sapiens; identical to SEQ ID NO: 6

SEQ ID NO: 9245 - DNA, 393 bp, Homo sapiens
ccaagactggtggcctggaaatagactcagattttggtggcttccgggtaaatgcagagctacaagcacgctctaacatctgggtggcaggagatgctgcatgcttctacgatataaagttgggaaggaggcgggtagagcaccatgatcacgctgttgtgagtggaagattggctggagaaaatatgactggagctgctaagccgtactggcatcagtcaatgttctggagtgatttgggccccgatgttggctatgaagctattggtcttgtggacagtagtttgcccacagttggtgtttttgcaaaagcaactgcacaagacaaccccaaatctgccacagagcagtcaggaactggtatccgatcagagagtgagacagagtccgagg

SEQ ID NO: 9246 - DNA, 375 bp, Homo sapiens
ccattcccccagccttctccatgacgtaggccatggggttgcattcgtacagcagtctcagctttccattggggctcttcttgttagcggggtacagaaatatccctccgtagaccagagtgcgatgaacatcagccaccatggagcccacataccgggccccataaggagctgaattatctggggggaacttcttcctctggatgtactcattgacggcagggtcaaagtccttggcgtagccctcgttaaggctgtagattttacctttcttttttatcttcacatccttgtccaccaaaatgaactccccgatggcctttttagacaaggaaggaaaggtggagagatgacgagcgcactgggtcccccagg

SEQ ID NO: 9247 - DNA, 268 bp, Homo sapiens
  misc_feature (1)...(268): n = g, a, c or t
gagtgtattcgcatctacgacgtgcacacctgcaagtagggcaccagggcgctgggaaggggtgaagtgtgtggctgggcggattcagcgaagtctcatgggaagcaggacctagagccgggcacagccctcagcgtcagacagcaaggaactgtcaccagccgcacgcgtggtaaatgacccanacccaactcgcctgtggacggggaggctctccctctctctcatcttacatttctcaccctactctggatggtgtgtggttttt

SEQ ID NO: 9248 - DNA, 377 bp, Homo sapiens
ctgtggcgggtgttagagatgtctgacatcgtcctgcttatcactgatatccgacatccagttgtgaatttcccgccagcactttatgagtatgtgactggagaacttggactggccctggtgctggttttgaacaaggtggatctggccccgccagctcttgtggttgcctggaagcattatttccatcaacactatccccagctccacgtcgtccttttcacctcttttcctcgggacccccgcaccccacaggatcctagtagtgtcttgaagaagagtcggaggcgggggagaggatggactcgggccctggggccagagcagttgctgagagcctgtgaagccatcactgtggggaaagtggacttgagcag

SEQ ID NO: 9249 - DNA, 181 bp, Homo sapiens; identical to SEQ ID NO: 149

SEQ ID NO: 9250 - DNA, 329 bp, Homo sapiens
  misc_feature (1)...(329): n = g, a, c or t
ctgcctgagctgtggctccatggagtgggggaactgctccaggggccctggatccaggctcacagtgaaagctgctttgttaccagctcgggcgtagtccatttctgtgtatttcgtgaaccactcattcacctcctcctttgtgcggttggtgaacaggagacccacctcacccctcaaccttttgctgacctggtgcaggttgtctttgtattcatcagatgggctccgacccaaggccaccatcatnaccttgtttttgccaaagaacatncngctntgcttccaggcgttccggatgtccttcagcttgctgttcctcatgttgg

SEQ ID NO: 9251 - DNA, 296 bp, Homo sapiens
ccacgctggaggagccccaggagggcttggagtttgcccacatggccctagcactcagcatcaccctgggggaccggctgaacgagcgcgtggcctaccaccggctggccgccctgcaacaccgactgggccatggcgagctggcagagcacttctacctcaaggccctgtcgctctgcaactcgccgctggagtttgacgaggagaccctctactacgtgaaggtgtacctggtgctcggtgacatcatcttctacgacctgaaggacccgtttgatgcagccgggtactaccag

SEQ ID NO: 9252 - DNA, 310 bp, Homo sapiens
  misc_feature (1)...(310): n = g, a, c or t
aaagaggaagctggcgcgtatggcagccgaggagcacactctgcaggacactggacaagacagtaaatattcaacttttaatgctgattaaaggagtataggtaaagaatacgtaggtatacataattggtgagacaaatattcactttatttatattttatatattatttttttaatttggtaaatactatccagttttgtagttgtccttgttgatttgtgtgatattaaagtattagtaataattgccaggaaactatcattagggagggtttagttggttgctgtttggactggganggatgattt

SEQ ID NO: 9253 - DNA, 521 bp, Homo sapiens
  misc_feature (1)...(521): n = g, a, c or t
aaaggtgtgtgtattctgtttgcatctccctgtcactgtgacacacctagatgtgtgttacttcaattaaaattctcaaatttaattttgatttgcttcagaagggaaaatattctcaataatgtaaaataattaaggtctatacatgggttgtatttttctggttcacaacagcacaaagtgtctttcatttttttgttggttttcttttaagatcttttttaccctgaagtcagtgaatacttttctagtttatttgatactctttctgtgtatatattaagcttttgctgtagattgcctagtaaaattactaaggataggttgtttttacatatggtctatttaagtctgatgtttacgggggaaagtgtanttactaaaaatgtttaacataatttggaagaagagtatgaacaaccaataccaatacctattgcgtttggattcttaagaccccagtttgttattccactaaactagttatcttaaccatatcatctggttttgngggccattat

SEQ ID NO: 9254 - DNA, 397 bp, Homo sapiens
aaacattattcactactgtttttgaagtgagaaagtatcagccatttagcatttaagttggggtatttagagcctgtaatctaaatgctggctcaaatttattccccagctacttcttataccactattcttttaatgtttgcataatcataagcacctcaacacttgaatacataatctaaaaattatatagtaaagctggtagccttgaaaatgtcagtgtgatatctattatgtagataaatatatatagtggcctttcaggactgtcacagtaacactttatttacagagctaatgtttgtcctaaattttcaggaccctagaggagagctttatacaattaccgatgtgaatttctctaaagtgtatatttttgtgtccagttatattattt

SEQ ID NO: 9255 - DNA, 255 bp, Homo sapiens
cttgacgaggctgcggtgtctgctgctattctccgagcttcgcaatgccgcctaaggacgacaagaagaagaaggacgctggaaagtcggccaagaaagacaaagacccagtgaacaaatccgggggcaaggccaaaaagaagaagtggtccaaaggcaaagttcgggacaagctcaataacttagtcttgtttgacaaagctacctatgataaactctgtaaggaagttcccaactataaacttataaccccag

SEQ ID NO: 9256 - DNA, 385 bp, Homo sapiens
ctgctgcactgcactttgcgattcaacaagtcagggaagaaaacatcaggaagcagctaaagaagctggactgcgagagagaggagctattggttttccttttcttcttctccttgatgggcctgctgtcgtcacatctgacctcaaatagcaccacagacctgccaaaggctttccacgtttgtgtagcaatcctcgagtgtttagagaagaggaagatatcctggctggcactctttcagttgacagagagtgacctcaggctggggcggctcctcctccgtgtggccccggatcagcacaccaggctgctgcctttcgctttttacagtcttctctcctacttccatgaagacgcggccatcagggaagaggacctcggccg

SEQ ID NO: 9257 - DNA, 529 bp, Homo sapiens
aaaagtttttatttacctaaaaacataaatttatcaaacatatcaatttgctttgcagagcaatttacataaaaattcatgatgtataccaacgacagcatagcattatctacctcagtttgtgaagcatcctttcctacagatctcagcaaaacgcagagccagtaggggaaattcaagctttcatttgggggcctctggggtcctacctgctggcagttctttcagcagaaagtggggtacgggggatgctgaagagggggaagtggaccccattgcctgttaagtcccatctgtctcagtttgaagcaacacgggaatttccattggaggagggttggcctgccggcctggcccttctctcacgccccctctacttcagctacatttcttatgcatgttcctcaaagctgtgaaaatcaatacaaaaaaaactgacctttacttcattcctgtaacaggctatcaggatctcaaggagatccacctgcatcgagatcagtctcaaaaacggggcatgtaaaacata

SEQ ID NO: 9258 - DNA, 494 bp, Homo sapiens
ccttatttctcttgtcctttcgtacagggaggaatttgaagtagatagaaaccgacctggattactccggtctgaactcagatcacgtaggactttaatcgttgaacaaacgaacctttaatagcggctgcaccatcgggatgtcctgatccaacatcgaggtcgtaaaccctattgttgatatggactctagaataggattgcgctgttatccctagggtaacttgttccgttggtcaagttattggatcaattgagtatagtagttcgctttgactggtgaagtcttagcatgtactgctcggaggttgggttctgctccgaggtcgccccaaccgaaatttttaatgcaggtttggtagtttaggacctgtgggtttgttaggtactgtttgcattaataaattaaagctccatagggtcttctcgtcttgctgtgtcatgcccgcctcttcacgggcaggtcaatttcactggttaaaagtaagagacag

SEQ ID NO: 9259 - DNA, 320 bp, Homo sapiens
caacgatgaggctgctgtcatttgtggtgttggctctatttgctgtcactcaagcagaggaaggagccaggcttttggcttccaaatcactgctgaacagatacgccgtggagggacgagacctgaccttgcagtacaacatctacaatgttggctcaagtgctgcattagacgtggaactatctgatgattccttccctccagaagactttggcattgtgtctggaatgctcaatgtcaaatgggaccggattgcccctgctagcaatgtctcccacactgcggtcctgcgccctctcaaggctggttatttcaacttc

SEQ ID NO: 9260 - DNA, 450 bp, Homo sapiens
cctcccaaagacagcaatgggagaagtgaccccataactgcataaaataatccctcttctttgaagctcttggcaggaatcgctcagccagcaggaaacctttaacccaatacccagaaaaacagacatttggaggaagagggatcttccagattattcttccattctgccccatcctctacagagaaggaaactaagacacttttcaagaatcacaagataagttaatgatagaaagcagagtagaatcttgagtggaggagtgaaaataacattcactttgttcaaatcccagctctaccactttccaatggtgtgaacttgcacaaataactctgagtctcattttcttcatttgtaaaatggagagaacaatctccgcttcaagagattgtcttaaatggaacatgcaaagcatcactgatatcgtttaccaaccacacatagcag

SEQ ID NO: 9261 - DNA, 342 bp, Homo sapiens
aaacttttgagttgtagtcagaaactgttgttggactgcatagttttcaaaagtttttggtacatttctgactttagaaatctggggtaggaatccctttccatatgcatatagactattttctgagcttcttcaaaacatgtttcagtgggttcctgaatgttcctgatgatagtctctcttgtcgaactgtcaatgttaatctctctaggggactgtggctggatgtaaatcttataaagcttctttgccctagaaattccgctccaccgtgaggcaattttcttataggtttcacatgccatccagaattgaatattctcgtcactgtgctccattttt

SEQ ID NO: 9262 - DNA, 201 bp, Homo sapiens
cctctgtggatcccagtttgtcgtggggtcagaggaaaaaactttactatgacacggactatggttccaagtcccgaggccggcagagtcaacaggaggcagaggaggaggaaagagaggaggaggaggaggcacagatcattcagcggcgcctagcccaagcgctgcaagaggatgattttggtgtcgcctgggctgagg

SEQ ID NO: 9263 - DNA, 580 bp, Homo sapiens; identical to SEQ ID NO: 330

SEQ ID NO: 9264 - DNA, 318 bp, Homo sapiens
ctgccggcgccgggaaaggggctcacgtaccagggactctccattgaggtagatgaggtcgaaggcgtacaaacacacctgcacctggatctcagacgcatccacctccttgcgtttgcgggtggtgagcacttggaatggctggatctgcttcttttcccggtcccaagccacggcttcggtgtccaggatgaaggatgtgaccgatgggagtttaatcttggggatgcggctgatgatgtccgggtacttcccagtgttgtcttcctgattcctgctgaagatcttcacctccccgccttccagggcgtggatctg

SEQ ID NO: 9265 - DNA, 232 bp, Homo sapiens
cctgagatcagaggaaagcccccaatccgtgtttcacaggtactcacaagagaaaatgctaggagggttgtgccttgctaagggaaggaagaaaagttgggggtggggagcatgagatttgatgcagttagtaaagaatgaactctgaaaagtgttacgagagagagagagacttaaaacaaccatttgtttagctcatgactctatagattggcaattgagctgagttcag

SEQ ID NO: 9266 - DNA, 199 bp, Homo sapiens
aaaagaagaagaaaagctaccaaagctgaaatggtggcacctccttcgagtgagcccgggagtcctccctgacggccgaggcaggctctggccgcactcccgctcgagtctcccttcctgtctgcagattctgcgtgacagtcacggaacggcgtgatgggggcagcagagcgtgggggcctctgtccagcactcgtgg

SEQ ID NO: 9267 - DNA, 474 bp, Homo sapiens
ctgatgactttcttaatagaattgcattgacggatgcttaccttttatacacaccttcccaaattgccctgactgccattttatctagtgcctccagggctggaattactatggaaagttatttatcagagagtctgatgctgaaagagaacagaacttgcctgtcacagttactagatataatgaaaagcatgagaaacttagtaaagaagtatgaaccacccagatctgaagaagttgctgttctgaaacagaagttggagcgatgtcattctgctgagcttgcacttaacgtaatcacgaagaagaggaaaggctatgaagatgatgattacgtctcaaagaaatccaaacatgaggaggaagaatggactgatgacgacctggtagaatctctctaaccatttgaagttgatttctcaatgctaactaatcaagagaagtaggaagcatatcaaacgtttaactttattt

SEQ ID NO: 9268 - DNA, 260 bp, Homo sapiens
ctgtttccttctcttcctttgtggtgccattcccagggcacaggccatagctgtagttggggggcagtgggtatgggatgtgcccccggggcatcaggaggaaagtgcgtgctacatgccaggtactgcagacagagatgaagatgaaggaggccctgaggctgatgcctttttcataaagaagcttaataataaggaagactgccgaggaagagtcaaatgctccattgtacagagtgatgatggtcgaacggtgttgg

SEQ ID NO: 9269 - DNA, 136 bp, Homo sapiens
ccaaacagtgcccagcttaagcatccctggcatcagactatggccttcaagagcactagggcatatgcttttggcagcataacgggctggcttggtgatggagggaaaaagccttgagccaggcagaagtttgtgg

SEQ ID NO: 9270 - DNA, 251 bp, Homo sapiens
ccttcgtcagcctgcccagagaaggggagcagaacttcagtgcagaggagttctctgacatctctgagatgcgggccttggcagaactcctgggcccctatggcatgaagttcctgagtgaaaacctgatgtggcatgtgacctctcagattgtggagctgaagaagctggtggtggaaaacatggacatacttgttcagatcagatccaactttagcaagccggacttgatggcttccctgctgccccag

SEQ ID NO: 9271 - DNA, 356 bp, Homo sapiens
ctgctcggaaagctctggacagatgcagtgaaggctccttcctgctaaccacatttcctcgtcctgtgactgtggagcccatggaccagttagatgatgaagagggacttccagagaagctggttataaaaaaccagcaatttcacaaggaacgagagcagccacccagatttgcacagcctggctcctttgagtatgaatatgccatgcgctggaaggcactcattgagatggagaagcagcagcaggaccaagtggaccgcaacatcaaggaggctcgtgagaagctggagatggagatggaagctgcacgccatgagcaccaggtcatgctaatgagacagggtgagtctagg

SEQ ID NO: 9272 - DNA, 406 bp, Homo sapiens
ccaggctggtctcgaactcctgatctcatgatccgtctgcctcggcctcccagagtgctgggattacaggcatgagccactgcgcccggccaagaaagtatgtttttagaggtgtgtgtaagtgcatttgtattacctatgaacaaaattacctgactcttgtcccaggaaagctgtttcgcattttcgctttttgattggtattatccagttctatgtagttcatattattgttctgtctgactctcagaaattacttcttcacgccagtgtcttgttgcatgactttgatgtcacctataggaatacacctcactgcacgtaagtgggtatcttactgtataaaaggtctacatggctttaggttttaggacaaatgtgtagatttatagaccatttctgctgg

SEQ ID NO: 9273 - DNA, 306 bp, Homo sapiens
  misc_feature (1)...(306): n = g, a, c or t
ccttgcctcanatccaaggtcactcggaagaggccatgtctaccctcaatgacactcatggaggaaatgctgagagaagcattcagatgcatgacacaagagccaatgaaaggccctattgctatgcaatctggtccaaaaccactcttcaggaggatgtcttcactggtgggccccacgcaaagcttcttcatgagggaatctaagactttgggggctgtccagattatgaatgggctcttccacattgccctggggggtcttctgatgatcccancanggatctatgcacccatntgtntgact

SEQ ID NO: 9274 - DNA, 243 bp, Homo sapiens
ctgtggcttagctggctttgctggtcgtaatggaggacaaaagtgccttctggtgaaactcagcttccatagtgatgggacctaagggtagcagagtttatggtgaccctgtagtgtatctccagaaatggtgattgtttgaatgcatgtaagacattccctagggactccaagaaatattgattagaggaagatgtggtgctttgaaagggacttggtgttcctacatgaaccaagtgaagg

SEQ ID NO: 9275 - DNA, 548 bp, Homo sapiens
aaataaaattcagtccggccgcggtggctcatgcctgtaatcccagcactttgggaggccaaggcagacagattatctgaggtcaggagttcgagaccagcatggtcaacatggtgataccccatgtctactaaaaatacaaaaaaataaaaattagccaggtatggtggtgggtgcctgtaatctcagatacttgggaagctgaggcaggagaatcacttgaaccagggaggcgaaggttgcagtgagccgagattgcaccattgcactccagcctgggcaacaagaacgaaactccgtctcaaaaaaaaaaataggccaggcgtggtggctcatgcctgcaattccagcactctgggaggccgaggcgggcggatcaagaggtcaggagatcgagaccatcctggctaaaccccatctctactaaaaaacaaaaaaaatcagccagacgcggtggcgggtgcctgcagtcccagccactccagaggctgaggcgggagaatggcatgaacccaggaggtggaggttgtagtgagccaaaatcgcgc

SEQ ID NO: 9276 - DNA, 333 bp, Homo sapiens
aaaaaaaacaacagcgtaaatattagcccacaagagcagtcctaaacaatcacaattacactgtactacccaagaagactgtttattgtgaagcatttacctttcaaaaaatcattacatttctatttcttggtggagcagcacattgtggagtgtgattcttaattcttcattgagtttgtcaataggacattgatgctggataggttgtcttttgtttttatgtctcagaccatcttgtgagattgtttgcctatctcataatacagttttatgcagaaaggttgaaactatgtaaatggtttttatggaaattatcagttacaacatttt

SEQ ID NO: 9277 - DNA, 157 bp, Homo sapiens
aaaacatcgcgctaagtggacgaattcagacacaaccgtctacgtgttgtatggctgcattcacgttcaagtcaagtccaaatagggcacactgcagagacaaagccaggtcatggttgctcaggaccggaagcctgttgggggcggggggtggggt

SEQ ID NO: 9278 - DNA, 252 bp, Homo sapiens; identical to SEQ ID NO: 151

SEQ ID NO: 9279 - DNA, 546 bp, Homo sapiens
ctggagagattgttgaagcagatgttgccattgggaaaggcgatgagactccacttacaaatgtgaagacagaggcatcccctgaaagcatgttgtctccatcacatggctcaaatcccattgaagatcctttagaggcagagactcagcacaagtttgaaatgtcaggatgccccaggtgaggatgaggaggaagatggtgtcagtgaagcggccagcctagaggagcctaaggaagaggatcaaggagaaggctacttgtcagaaatggataatgaacctcctgtgagcgagagtgatgatggcttcagcatacacaatgctacactgcagtcacacacactggcagactccatccccagcagccctgcttcttcacagttctctgtctgtagtgaggatcaggaagctattcaggcacagaaaatttggaagaaagccatcatgcttgtatggagagctgcagctaatcataggtatgccaatgtcttcctgcagcctgttacagatgacatagcacctggctaccacagcattgtgcagagg

SEQ ID NO: 9280 - DNA, 346 bp, Homo sapiens
aaaatgtctttgagtctgtccctttctctctgttcccactgcccctgctcaatactgtcatttgattagactattgtataagcctctcttatgaactgaatatttttgtcttccccaaattcatgttgaagctgtcactcccaatgtgacggtatttggaggtaaagcctctgggaggtaattggtttagatgaggtcatgaggatggggcctccatgatgggattagtgcccttgtaagaaagtggaagagagaccagagttctttatctccaccgtgtaaggccacagcaagaaggaggccgtctccaagccaggaagagagccctcccagggaactcactcag

SEQ ID NO: 9281 - DNA, 539 bp, Homo sapiens; identical to SEQ ID NO: 551

SEQ ID NO: 9282 - DNA, 459 bp, Homo sapiens
gtgttgtgctgtggggaagggagaaggatttgtaaaccccggagcgaggttctgcttacccgaggccgctgctgtgcggagacccccgggtgaagccaccgtcatcatgtctgaccaggaggcaaaaccttcaactgaggacttgggggataagaaggaaggtgaatatattaaactcaaagtcattggacaggatagcagtgagattcacttcaaagtgaaaatgacaacacatctcaagaaactcaaagaatcatactgtcaaagacagggtgttccaatgaattcactcaggtttctctttgagggtcagagaattgctgataatcatactccaaaagaactgggaatggaggaagaagatgtgattgaagtttatcaggaacaaacggggggtcattcaacagtttagatattctttttattttttttcttttccctcaatccttttttattttt

SEQ ID NO: 9283 - DNA, 113 bp, Homo sapiens
ccagcttcttcagcaaggtcatgggcatcctcatcaaccgcaagacagaccagctcgtgtcctttcttcggaagaaggatgacttcgtggacctgctgctgcagcacattggc

SEQ ID NO: 9284 - DNA, 179 bp, Homo sapiens
  misc_feature (1)...(179): n = g, a, c or t
gttttaaggcgccatgaggggtgacagaggccgtggtcgtggtgggcgctttggttccagaggaggcccangaggagggttcaggccctttgtaccacatatcccatttgacttctatttgtgtgaaatggcctttccccgggtcaagccagcacctgatgaaacttncttcagtgagg

SEQ ID NO: 9285 - DNA, 542 bp, Homo sapiens; identical to SEQ ID NO: 331
  misc_feature (1)...(542): n = g, a, c or t

SEQ ID NO: 9286 - DNA, 484 bp, Homo sapiens
  misc_feature (1)...(484): n = g, a, c or t
ccattggaatctcatttataaatggaccttttaagtatattaattcctcttcagaattgagctggacacatttggcattcttagtttgtcatataaccaggtttatccttagtctaactgcaagggatagaacctgccctaggtcacaatcattctgtccaatccagccaaggttccctccacatatgaagatggaccatggcaggatacaactgattgtgtggcaccatgtattagcagtgggaatatgtatcacatatgatgcagcctttcatatttcagcagtttgccactgtgactgtctggcaagcccccagatggcgttatattaattggattagattattttgctcaccttatgtaatactgtaacttcctataacctaatattttcggtatcattaaccaaaatttcacactcatagnttgctaaagagaatgttattcaatcattaaactctgaactgatttcttctatacattt

SEQ ID NO: 9287 - DNA, 502 bp, Homo sapiens
ctggatgacctggggcaagccgcttccccactctgtgcctcagcttttcatcagcaaagtagagataaaaacagcatccacctcactgggctgctgtgaggattatcggagcttgtatttgtgctcggcacaggtaagcaccagttaaagaaactgggtaacaggacaaatgcttatctacacagacaagactcctgaagttataaaccacagactatggtctacacagctcatatcaggtgctgtgcccagggcttgggacctaccagcacatttaaccctgtaaggtagattattattatacccattttccaggtaaggaaactgaggcatggatttacatagaggtgggggcggggctggacagaggtaccaaagctcacagcttctagaaggatgttctgtgcatgaggcagtggctatgaccctgctggactaattcaaggacatgctctccccaaattgtgcctctgcatctcaccgagatggctcagttctgtgc

SEQ ID NO: 9288 - DNA, 375 bp, Homo sapiens
  misc_feature (1)...(375): n = g, a, c or t
ctgatgcctcactactagatgcagngctgggaccttcctcttttggagctgtcccatgtacagtggacccaagctcaggaccttcgtggagctgcttctccaacctgagaaactcaagacccatcctcccgctgtcactttggacaatggaaatctacattttcttttcccttttttttttnttttgagacagantctcgccctgncacccaggctggagtccagtggcncaatcttggctcactgcaacctctgcttcccgagttcaagcaattctcctgcctcagcctcctgantagctgggattataggcatgcaccaccacacccagctattttttgtatttttactgnagacagggttncaccatgttgg

SEQ ID NO: 9289 - DNA, 337 bp, Homo sapiens
  misc_feature (1)...(337): n = g, a, c or t
ccaagggtaggggcggggcggggaagtgaaccccgacggtcagcgctttgtcatctggtttcagccccgctgccgtgcacggngggactggagcaagtcgctcacctgaaatgagtatgagcagaccttccctgggttacgaattgagatgggatgaaaatgctttaacttcgagtgttttgaaggattaaataaccgaagtacaaagtagtagtagcggagacagtaaggaagtcgggcgtggcggcgcgcacctgtggtcccagctactcggaaggctgaggggggaggatcacttgagcccaggagttcgaagctgcagtgagctgtgatgtgg

SEQ ID NO: 9290 - DNA, 316 bp, Homo sapiens
ctggaatgttgttggaggtctggtctccttccttggggaaagtgattttggttccttctttccaccccttcttcacttcgatggtcaatattttgtcttcgtttcgaatgctctttccgtcggggtttagccgcttgtgggagattttcatcttcttggtacagccgctgtagatctcttcaagggagactcgaaggtcgtgggtgactgggggatcttgcttctttcgggcgggctcttgggcagagcgggagcggccaaagttcacgttggtgaagccacccatgcccatagggaagccagagaatgggtcatc

SEQ ID NO: 9291 - DNA, 287 bp, Homo sapiens
cctccacccaggtgccacgcacggtgcctcatacccagagagtagccaacattggtactcagaccacaggacccagtggggtaggatgctgtacaccaggccggccgctcctgccgtgcaaatgttcctcagcagcacatagcacctatcgggtccaggagccggctgtgcacatcccaggacaggagcccctgaccgcgtccatgctggctgcggcgcccctgcatgagcaaaagcagatgattggggagcgtctctacccccttatccatgatgtccacacccag

SEQ ID NO: 9292 - DNA, 380 bp, Homo sapiens
aaaaaatcttaggtttttttaagaagcagaaataatttccaaattgcctccagagacaatgattttatcctctgcagaagctggtcagaaccttcttgatcacagccccagttagatacagggaagaatggcgcttcctacagcttcagcggcctcagctcagctctgtgccccaaggccaaaccagctcatctccagccccatccatcctattcttgctgagtcaccagtctcatcatcttcagagccatgtccccttggtcagaaggaaccatatgaccagctttcagaatccagtagaaagcaaggttcttgtaggacttgacaaaagcagatgtttccaaagatttagggtcactgtacagggccttccacttcag

SEQ ID NO: 9293 - DNA, 366 bp, Homo sapiens
ctgcagggcgaaccgctgcttcctattggtgtccaccacgcgctgcacatcttcagcagagaagccgcggaactggggcaactgcaggagggtgcccaggggcacgaagccatctgtgggcaggcagggtgctcaggagctaaccttgctctggactgggccagggttaacagggagccacaggcaaccgaaacaaagtctgggcttggagatcgcttgggcatcctctgtgggacctttagaaagtctcccctttctgggccgcagttttttcaacttacataaaaagaggatctgcctcacggaggggcagggaggtgagtgcccagcatagcgctggcccggagtgcacactcacaccaccag

SEQ ID NO: 9294 - DNA, 333 bp, Homo sapiens
aaacttatctgtttgtaaattgtaactgattaagaattgtgatagttcagcttgaatgtctcttagagggtgggcttttgttgatgagggaggggaaactttttttttctatagacttttttcagataacatcttctgagtcataaccagcctggcagtatgatggcctagatgcagagaaaacagctccttggtgaattgataagtaaaggcagaaaagattatatgtcatacctccattggggaataagcataaccctgagattcttactactgatgagaacattatctgcatatgccaaaaaattttaagcaaatgaaagctaccaattt

SEQ ID NO: 9295 - DNA, 347 bp, Homo sapiens
aaagctgtccatttatcttgatgcctaaaagttgggagatgctataaagacgatgacatttctaaactggactacactgtttctggaaactgttaagctgagtccagtacttttaagcctgacagtatctgaggatcctaatatggtgctaagccttcaggggtggagcggggaaagagtattaaaaaaggagtgttaaaaaatccctccaaaattcaggaatcagcatcataaatttaaccattcaaaatgtggtattatagaaaccaaaacattcattttgaccaaagaaaatctgtgagtcatttcctaagcctgggaaacaagccacaggatatagtgacttt

SEQ ID NO: 9296 - DNA, 297 bp, Homo sapiens
ccagctctcgagtgggggtgatgattatggctccaacctgactcttttttaacttctcttctcttctcagaagaatttccaggatggggatgacaaaagcgagtgttttgccactacctgtgacccgaggcactcaccgcttctgcagcgacatctttgtttcgcatgaacagagggatggttgcggactgcaccggcgtcatgtacgggaagcccagctcccgcagcgcgcccagcacctgcgggtgcagcggcacaggcagcgactcccaggagccctctgtcacatgctccatg

SEQ ID NO: 9297 - DNA, 247 bp, Homo sapiens
ctgctatttctgcttcagcgaaagccacgatcccagcacacaggcatgcgctactgtgaggtcaggacgaggaaaagagccaggccctttcacccagatcgcggcggcccagcaggacttgcccggagtgtctcatgcagacttttgtgtgtgtgaagaaaagctttttgtcttgctctgggcaccctgaggccaaatatataatacttacatccagccccaaagcccccagtctgtctccactttt

SEQ ID NO: 9298 - DNA, 234 bp, Homo sapiens
  misc_feature (1)...(234): n = g, a, c or t
aaaaacaaaaagagggaatggatgcagaagcccgtctgggctttccgtggagtcgccccttcccaatggcgatggccgctccctgtggcctcagcttcctccgtggaatgaaggggtccaggtgacaccttcctcgaagggtgggcgtgggcctaaggctcccaagtcggccaggggctcggcctggctcanaagaggtgcttcacatcaacagtggtacggggtggccgctgg

SEQ ID NO: 9299 - DNA, 282 bp, Homo sapiens
ctgcagtccctagatctctgcctccgaacttgtgcttctcagaaccccctgagcccctctgggccttgcccctgtcctacatagctttcacaccgaatttatggattggtcccttagtaaccctctaagccttgctcacagttcttaaaaccgtctatctccttccaggctctgtgaagctggtgaccccggaggggtccccagtccggggacttcgcacacctgagatccccatgaccgaagcggtggaggccgtggctatggttggaggtcagcttcagg

SEQ ID NO: 9300 - DNA, 392 bp, Homo sapiens
aaacaccctgagatatgcagacagggtcaaggagctgagcccccacagtgggcccagtggagagcagttgattcaaatggaaacagaagagatggaagcctgctctaacggggcgctgattccaggcaatttatccaaggaagaggaggaactgtcttcccagatgtccagctttaacgaagccatgactcagatcagggagctggaggagaaggctatggaagagctcaaggagatcatacagcaaggaccagactggcttgagctctctgagatgaccgagcagccagactatgacctggagacctttgtgaacaaagcggaatctgctctggcccagcaagccaagcatttctcagccctgcgagatgtcatcaaggccttgcgcctgg

SEQ ID NO: 9301 - DNA, 404 bp, Homo sapiens
ggcggagaagctggagtgactctagggcagccgcatctttcgcgtcaggatctcaccaccttggatgttaccaagttgacgccactttcacatgaagttatcagcagacaagccacaattaacataggtacaattggtcatgtagctcatgggaaatccacagtcgtcaaagctatttctggagttcatactgtcaggttcaaaaatgaactagaaagaaatattacaatcaagcttggatatgctaatgctaagatttataagcttgatgacccaagttgccctcggccagaatgttatagatcttgtgggagcagtacacctgacgagtttcctacggacattccagggaccaaagggaacttcaaattagtcagacatgtttcctttgttgactgtcctgg

SEQ ID NO: 9302 - DNA, 197 bp, Homo sapiens
ccatcgtgcctctttgggcttccatgggcaactacatcaccaggatggcgcagaagtaccatgagtactcccactacaaggagcaggatgggcaggggatgaagcagcggcctccgcggggctcccacgcgccctatctcctggtcttccaagccatcttctacagcttcttccatctgagcttcgcctgcgcccag

SEQ ID NO: 9303 - DNA, 167 bp, Homo sapiens
ctgcgaatcggggagcccatgtattgacttagtgcggtagcatgcagccctcggcacggagggtcagtccccgctgttcttaaattagggtaaatggcgttggtgtccgtatttacagacttgaaatgtatcaatcctgagcagttccgatgtaaatccgagaccag

SEQ ID NO: 9304 - DNA, 243 bp, Homo sapiens; identical to SEQ ID NO: 622

SEQ ID NO: 9305 - DNA, 499 bp, Homo sapiens; identical to SEQ ID NO: 152
  misc_feature (1)...(499): n = g, a, c or t

SEQ ID NO: 9306 - DNA, 293 bp, Homo sapiens
cctggcctcacatgacccctgctccagcaacttgaacaggacaagcagcagctacatccttaaggtcgggaaagtaagatgaggatttggatcctgcattgccctgcctcccaccctatctctccccaaattataaacagccatccttgggaagcagcagagttaagacgtctccccactgccctagtgacatacacaccaacaggagagcatgttcagatggcacagaatccagggactgcatttcatgaggagaaactggtaccaaaatatgggtggggagtcggggggtg

SEQ ID NO: 9307 - DNA, 468 bp, Homo sapiens
ggcggccggtgagggggaagcaagtctggtctctgtgattgaagaagtcggctctgggctccagtgcgggaatcacacacatacctcagaatgccgggtctaagttgtagattttatcaacacaaatttcctgaggtggaagatgtagtgatggtgaatgtcagatccattgctgaaatgggggcttatgtcagcttgctggaatacaacaacattgaaggcatgattcttcttagtgaattatccagaaggcgtatccgttctatcaacaaactcatccgaattggcaggaatgagtgtgtggttgtcattagggtggacaaagaaaaaggatatattgatttgtcaaaaagaagagtttctccagaggaagcaatcaaatgtgaagacaaattcacaaaatccaaaactgtttatagcattcttcgtcatgttgctgaggtgttagaatacaccaaggatgagcag

SEQ ID NO: 9308 - DNA, 545 bp, Homo sapiens
  misc_feature (1)...(545): n = g, a, c or t
ccagcaaaaaggagcgttttctccaggtgcagtccatgatgtacgatctgatggagtggaggtcccagcttctctcaggaaccttacccaaggatgagctgaaggaactgaagcagaaagtcacgtccaaaattgactatggcaacaaaatccttgagcttgatttgattgtcagagatgaagacggaaatatcttggaccctgataataccagtgtcatcagcttgttccatgcacatgaggaagcaactgataaaatcacagagcgtatcaaagaagaaatgtcaaaagaccagccagattatgcaatgtattcccggatctcctcatcccccacccatagcctctatgtgtttgtgagaaactttgtgtgcagaattggggaagatgctgagctcttcatgtctctctacgaccccaacaagcaaacggtcataagtgagaactacctantgcgatggggcagccggggcttccctaaggagattgagatgctcaacaatctgaaggnggtcttcacggatcttggaaacaaagacctcaac

SEQ ID NO: 9309 - DNA, 342 bp, Homo sapiens
  misc_feature (1)...(342): n = g, a, c or t
aaacttttgagttgtagtcagaaactgttgttggactgcatagttttcaaaagtttttggtacatttctgactttagaaatctggggtaggaatccctttccatatgcatatagactattttctgagcttcttcaaaacatgtttcagtgggttcctgaatgttcctgatgatagtctctcttgtcnaactgtcaatgttaatctctctaggggactgtggctggatgtaaatcttataaagcttctttgccctagaaattctgctccaccgtgaggcaattttcttataggtttcacatgccatccanaattgaatattctcgtcactgtgctccattttt

SEQ ID NO: 9310 - DNA, 356 bp, Homo sapiens
aaaaattagtctgtactcaaatgcatagttaaaaaaatgaagcgagatggcagtttgtgcagtaatatctgcccttcgaagttcatgcaaccaactaatgcaatttttcctttcactcgtaaatctgaatgcagttcagtcatttgaaaccatctacaaaatccacaagattaagcagtttgccaagattaatatctaacagttgagcactggagaaagtgagggaaaggagtaaaaacaaacaacgaaaaagaccaagttagctagatatttcaactacataagggaggtgggtgaatgtcaaggctacaaaaacgaaacaaaaacaggaaaaaaaagtggcagcaatttttttt

SEQ ID NO: 9311 - DNA, 243 bp, Homo sapiens; identical to SEQ ID NO: 154
  misc_feature (1)...(243): n = g, a, c or t

SEQ ID NO: 9312 - DNA, 328 bp, Homo sapiens
aaaaagatccaaatgtgactgagatcattccagcctgcactttttatttgtaggcagaaggaacgggataggttgaggggcgtgatgggggctctcgccacctcttgtctgcacctctggaacaggtggtagccgaatcattcaagtcctacctggtcagactcccaaccacgctgaggcaggcccttacctggatggcctcatgggcctccctcttgaaaagaccctcactctgtttggaaaagatcccttagcagccataatcaggaaagagactctagagcgagcccagggcttccccaaagcggattttctgtcctgttttcag

SEQ ID NO: 9313 - DNA, 313 bp, Homo sapiens
cctcggtggggccgggcaggcagggcgggagctagcctgcaagagaaacagccccaatgctgggtaagagagcagttcaccccatccccccctccacgaccctggcgcccgccctgtacctgaaggcgcccgggttctgctgcagcgcatctggtaccatgtcttcattctcctcctggcagagggagcacatggagtagacgagccgctgcagggaagggaaagtgagcgcgtggcacagggctcgctgctggaaccctgccagggcatgcagacgcaccgggctaggtgtccctgccccgggatcctccag

SEQ ID NO: 9314 - DNA, 430 bp, Homo sapiens
  misc_feature (1)...(430): n = g, a, c or t
ccaacatggggaaaccccatctctactaaaaatacaaaaattagccgggcgtggtggagcacctgcagtcctagctactcaggaggctgaggctggagaatcgcttgagcccggaaggtggaggtgcagtgagccaagatggcgccactgcactccagcctgggcaacaaccacaactgaaaaaaaatctactgaggccagagtgagttggggcggggagcatggagagggggtcaggcttagccccaacaactcagaatttcacttccttgtacggccctcactttctccacctggccccggggcaggtctgagggtctgaagtctgttgatctgaaggtcctaggcaaatccagtcacttgggagccggagatatttaacatcacggcccggncccctttcccangggactcatttcctagcactctc

SEQ ID NO: 9315 - DNA, 310 bp, Homo sapiens
ccggcctgcagaccgactgcgaggcgctgctcagccgcttccaggagacggacagtgtacgcttcgaggacttcacggagctctggagaaacatgaagttcgggactatcttctgtggcagaatgagaaatttagaaaagaacatgtttacaaaagaagctttagctttggcttggcgatattttttacctccatacaccttccagatcagagttggtgctttgtatctgctatatggattatataatacccaactgtgtcaaccaaaacaaaagatcagagttgccctgaaggattgggatgaagtttt

SEQ ID NO: 9316 - DNA, 209 bp, Homo sapiens
  misc_feature (1)...(209): n = g, a, c or t
cttttttttttttttttttttgacctggagtctcgctctgtcacgaggctggagtgcagtggagcgatctctgctcactgcaacttctgcctcccgggttcaaacaattctcctgcctcagcctcccaagtagctgggactacaggcgcgtgtcaccatgcctggctaatttttgtatgtttagtananacggggtttcaccatgttgg

SEQ ID NO: 9317 - DNA, 435 bp, Homo sapiens
ctggattaaggacatgatcttgaacttccagacatctgaatttcagtacacactggatttaggtacctaatgggtggtcctggacacactgtgtacacgtaaaagagaaactgtggggaaaaatgtagaaaacagaaaggagccaccaaaaatccatgagtggaggacagtaaaaggtaggtggacagactggtttgtgttaaagataatggtctagaaggggctatactcagaattattcctgtgtccgtgcaggcagttgagattattaacaggtggtggagagaacaggttgctgttgcagattcagtgtctgagggtagaattatactaggagacctataggcacttgtgtaggtttttggcaagaaactagaaaagaaggcactgtgatgggattcctaagggtggtacttactcctgggaggggcatgg

SEQ ID NO: 9318 - DNA, 373 bp, Homo sapiens; identical to SEQ ID NO: 90

SEQ ID NO: 9319 - DNA, 175 bp, Homo sapiens
ccagagggaccgtaagactggtacaagtttacaccataagaggcgacgtggtcagccacaatgtcttcacctccacaggggctcatcacggtggtcagggcaagggtccccagcatcagagctttgtttaggatcatcctcttcccaaggcagccttagcagttgctgttctgag

SEQ ID NO: 9320 - DNA, 173 bp, Homo sapiens
ctggcttgcctgctggcctgcttcctggagataggatgctcagacccaccgccgctcttcaggggtcgtggaaggaattaatgcacttccttctgtcccccaatctctgtccctttacgtgtctctggagctgagcaggtattctttttctttcttcatctcagtagagctgg

SEQ ID NO: 9321 - DNA, 353 bp, Homo sapiens; identical to SEQ ID NO: 327

SEQ ID NO: 9322 - DNA, 284 bp, Homo sapiens
aaaaatacagttccccaggttgaggtatgtggtggcctgttgtcacggcagcatgagcacggcggcgcccagggcgggggcggaagggcctagctggagactgccatcacgtagttcttggaggggctgctccggcccagcagcacttggttcttgcaggtgaggagcccacaggaggcggccagtggggcctcctcgtacaagacgcagatggagccgtcctccccaatgcggtaggacacctcataggggtccacccacagggtcagctcgctgggcagcag

SEQ ID NO: 9323 - DNA, 356 bp, Homo sapiens
aaaaaaaattgctgccacttttttttcctgtttttgtttcgtttttgtagccttgacattcacccacctcccttatgtagttgaaatatctagctaacttggtctttttcgttgtttgtttttactcctttccctcactttctccagtgctcaactgttagatattaatcttggcaaactgcttaatcttgtggattttgtagatggtttcaaatgactgaactgcattcagatttacgagtgaaaggaaaaattgcattagttggttgcatgaacttcgaagggcagatattactgcacaaactgccatctcgcttcatttttttaactatgcatttgagtacagactaattttt

SEQ ID NO: 9324 - DNA, 475 bp, Homo sapiens
ctgcggcgactgcggggcccagccaagtgccgcgagtgcgaagccttcatggtcagcgggacggagtgtgaggagtgctttctgacctgccacaagcgctgcctggagactctcctgatcctctgtggacacaggcggctcccagcccggacacccctttttggggttgacttcctgcagctacccagggacttcccggaggaggtaccctttgtggtcacgaagtgcacggctgagatagaacaccgtgccctggatgtgcagggcatttaccgggtcagcgggtcccgggtccgtgtggagcggctgtgccaggctttcgagaatggccgagcgttggtggagctgtcggggaactcgcctcatgacgtctcgagtgtcctcaagcgatttcttcaggagctcaccgagcccgtgatccccttccacctctacgacgccttcatctctctggctaagaccttgcatgcagacc

SEQ ID NO: 9325 - DNA, 314 bp, Homo sapiens
ctgtatatgggttcagattagaaaatattaaataaatacagggaaaaatatttttaattagcttaatttatatatgaagatattttatttaatttgtttttgagacagggtctttctctgtcacccagactggtgtgcaatggcacaaacacatctcattgcggcctggacctcctggcctcaggtactatgcctagctaattttttttattttttgtagagatgcattctcactatgttgcccaggctggtcttgaactcctggcctcaagtgatcctcccgtctttaccttccaaagggttgggattacagg

SEQ ID NO: 9326 - DNA, 545 bp, Homo sapiens
aaacaaacctaaaatcagtttaacctgcaatgagactttggaaccagctacagtccttaaaacagatgccagaaattgctcatgtggtgacagaaactgcagaataggtgaaatgcttgctgtttcctcatatgctcaggttggcatcttgagcttccatggggtttcggtgcccctcaaaaaacctggacctgcaattctggaatgctgccaccaggggaaggtatggcttgatcacttgccagatttatagaaggctcaggtaagtactgcagctcctggggataactgccttggagtagagagaaactgttgagaaatcatggatccagataactccaaaaaaagagtaatgtgcctgtccatgcatcacccttacatacagacatggagacatttacagagtgagtgaatcacagccacatccaggtagatggcaagaacccaagcctatcatcagccacagtccagggaatttctgtgaagaatgggcatacctgccttcctttgtaaataattctcttcttccacttaaatcgttattt

SEQ ID NO: 9327 - DNA, 307 bp, Homo sapiens; identical to SEQ ID NO: 155
  misc_feature (1)...(307): n = g, a, c or t

SEQ ID NO: 9328 - DNA, 425 bp, Homo sapiens
aaaaagaagaggaggaggagcgaggactctgaagaagaagaactagccagtactccccccagctcagaggactcagcgtcaggatccgatgagtagaaacggaggaaggttctctttgcgcttgccttctcacaccccccgactccccacccatattttggtaccagtttctcctcatgaaatgcagtccctggattctgtgccatctgaacatgctctcctgttggtgtgtatgtcactagggcagtggggagacgtcttaactctgctgcttcccaaggatggctgtttataatttggggagagatagggtgggaggcagggcaatgcaggatccaaatcctcatcttactttcccgaccttaaggatgtagctgctgcttgtcctgttcaagttgctggagcaggggtcatgtgaggccagg

SEQ ID NO: 9329 - DNA, 345 bp, Homo sapiens; identical to SEQ ID NO: 332

SEQ ID NO: 9330 - DNA, 462 bp, Homo sapiens
ctgagaggccaccagtgaggctgggccttatcttccccgccccacccctccccctctcaggctgtgccagcctcaggcaggccctgtgcatctctgggccagtctcaaatccttactgaatggctagatctgtgtacttcaggtctgtctttctgtttcttccactatttctacggctcataagtctctgtctcttctttcagggcgtctatttctttctcttgttctctctttttcccgtgtgtttccctttggagctgtttatgcctgtctcccttggtccaggtcggtgtgtctttctattaatttattttttgagacagggtctcactctgtcacccaggctgagtgcatggctcactgtagcctcaaactccctggctcaagtgatcctcccacctcgacctcccaagtagctgggaccccaggtgcacaccatcacacccggatttttttttacct

SEQ ID NO: 9331 - DNA, 127 bp, Homo sapiens
aaatccagaagacaaacctagaaaagcagcaagataaatatttacaaacattgtagaaaaacagcagtatttcaagttttgttaaattctttccttcagacataatgtagacatagaggaggaacag

SEQ ID NO: 9332 - DNA, 550 bp, Homo sapiens
aaatatcacaagtaggtcttaagtgtcatctggcatcttctttctgtagccaggtaactcttagatcttattcatcagcctgctgaacagttcctttttcagagacatagataccatccaaaaatttcctgatatccttgtttttaactgttgtggcttgctgaatcaaagccgctgaatttgaaacaagctcaatgtcatttccttcaaggattaattcatctttctgggcttgagatactgaacaagcaacacctggtctcatccgaaccctgcggatgtatttttcacccaagaaatttcggatttcaacaagagacccattctcctggataacaacgttgatggggaagtgagcatacacagacctcatcttgtaacggaagcccagtgtaacacccttgatcatgttctgtacatgactacaaatagtccgaacggtagccagtttctttctgttaccccaccatttgtcaacccggagcctcttttttttctttccaagaaggctgagttctacattgatgtgattgaagtccctccgcaacct

SEQ ID NO: 9333 - DNA, 507 bp, Homo sapiens
ccacggagcccaatcctggcacaatgtggaggaggatatgaatcccaggaggcagggatgactgcaggcatcttggaggctgactaccaaccatggataggtaaatgagtgccaggagttaggagatcacacctcggtagagagagttccttgagccaggaagactatgcacaggctcaggaaggctggctgggcctaaacagaagtgggtcaaaggttaaggagtatgtctcagtctatttgggctgccatagcaaaatgccatagactgggtaactcataaatagcagaaactgattcctcacagttctggaggctgggaagtccaagatcaagttactggcagattgggtgtctggtgggggtccattcctcatagatggcatcttcttgctgagtactcaacatgacaggaggggtgaacaagctccctgaggtctcttttatatgggtactaatcccatccataaaggctctgccttcaagacctcgtcaccttcccaaagg

SEQ ID NO: 9334 - DNA, 437 bp, Homo sapiens
aaaggcacttatttatcattgtaggtgtgtctaaacaattgatattcaaaaacacaactttttgtgtacaaaattttacaatttttaacaaaagcagtgaagacactaaataacccagtggcgacctcttcaaagtgcagtgtccctggtcaccaatgcagatgctactggggcagccagcgggctcagagggtccaactccagacactgcatccatggctgtcctagactgagttgcacttgtaaaagagatggtcccacacctactaaaaaaacaagctactctagtatcaatatgacatcactcttttaccatcaatcatattgcaaaaccatagtatttaacgaccaataaacagccaaatacctaatgccacattgtcgttcaatttacctggctggttaatatcagtctgtgtttgagtatttcttttgag

SEQ ID NO: 9335 - DNA, 358 bp, Homo sapiens
aaaagctccaaccagctcatgccagctttccagagtcccatgatttccatttaagaccatgtggatactttaggatacggccctgaccccacattgccacagaagagggggtaagagtagaaccaaacaagttagcagttttctccacacattgagtctcatctgaaatactactgaggtgcaaaatgtgtgaatctcagctaatgtgcacagaaatacaattttttttgagagacatttgcttaaacgtggtaaagaactcttgttttatggactccttgcttcatgttcattttgtctgtttttcttttggcttttgacaatagctcatcctttttgagtgtgagtttaattatgg

SEQ ID NO: 9336 - DNA, 236 bp, Homo sapiens
catggaggtcatgtcttttcactgatacttttttgatagtttttatataacaaaatccttactctatttataacttaagatgataaggcactataaattaatgacctaaaataatatatttgtctgttatcttttgctatttctacttcactttaatttttagctgtaaaattggtaaatggattcttacaactatctctttccatttcttactatttggttttcaaatttcattt

SEQ ID NO: 9337 - DNA, 502 bp, Homo sapiens; identical to SEQ ID NO: 156

SEQ ID NO: 9338 - DNA, 86 bp, Homo sapiens
ctgacctgcttgaccgaaggatttctgacagactatctttggggatgttttcaagaagggatataagttatttactttgggcattt

SEQ ID NO: 9339 - DNA, 456 bp, Homo sapiens
cctctgcgattttgaaggacaactgctgctaaggagtctatctgtgattggagggttgaaacagtattaggtaagtcttccaaactgtttgtaagatcttgtgagagggagcaatagtacatgagggaagtagaaagcccgaccactccggttccaactgcagtagtcattcctagtcgtactaggatgggtattaactgaacggccctgcattggcacacttgagtttttacagggataggtaggttttgcttcctgggacaatgtcgatttttgggcttagaaaaaccagagtacaggtaccagtccagttgatagggtagcagaggtaggtggaggtaccgcacaggaagaatatgccttggctaggtaagtaaaattggttgtgtatgttaaaaagatgtgtaagcttgtggtctttgtatatccatgctcctagggtgcttgctaaggcag

SEQ ID NO: 9340 - DNA, 542 bp, Homo sapiens; identical to SEQ ID NO: 333

SEQ ID NO: 9341 - DNA, 538 bp, Homo sapiens; identical to SEQ ID NO: 157
  misc_feature (1)...(538): n = g, a, c or t

SEQ ID NO: 9342 - DNA, 323 bp, Homo sapiens
ctgtaagggccatttgaaagtttggaattttaagtgtctgtggaaaatgttttgtccttcacctgaattacatttcaattttgtgaaacactcttttgtctacaaaatgcttctagtccaggaggcacaaccaagaactgggattaatgaagcattttgtttcatttacacaaatagtgatttacttttggagatccttgtcagttttattttctatttgatgaagtaagactgtggactcaatccagagccagatagtagggggaagccacagcatttccttttaactcagttcaatttttgtagtgagactgagcagtttt

SEQ ID NO: 9343 - DNA, 298 bp, Homo sapiens
aaattaaatagctccagacaaaagcatgttattttccacatacgctatctttgtattctgcacagagttccaaggcaaagattgctcctggctttatgaattaccagagatgatgacttgtgtggctgacttatcacaggtcttttactcttccttcctgatagatccttagcttctttgggaggtggcatatgaattggtttccacggaattggattataaaaggctggttctggataggaatttccactgtaaaaacctgtaagttttccattggcataaccatagctctttgcag

SEQ ID NO: 9344 - DNA, 326 bp, Homo sapiens
aaagcagtaaaaattgaggtgcccttggatatccacaagcctaaattgagtacacccttgaaccagagcccctcagttaatggggtgaccgacatggggtagctgatcccagggggcattcccctctcgagctggccctgcactgggtggcctggggattgtgcttccttgcacagtggtgcacatttctatgtgtggatgagattttcttgtcaacttttcctgccaagacactaaatgcttttcagtgctaatactgacctgatagtagagatttctttccctgagtcggatggtagcaggatttacttggtaacccttggttt

SEQ ID NO: 9345 - DNA, 228 bp, Homo sapiens
ctggaagatggccgtactctttctgactacaacatccagaaggagtcgaccctgcacctggtcctgcgtctgagaggtggtatgcagatcttcgtgaagaccctgaccggcaagaccatcaccctggaagtggagcccagtgacaccatcgaaaatgtgaaggccaagatccaggataaagaaggcatccctcccgaccagcagaggctcatctttgcaggcaagcag

SEQ ID NO: 9346 - DNA, 466 bp, Homo sapiens
ccttctgcgccctccctgagcaccggctcaggcaccggggtcaggctgcaggaacacatggacagggagaagtaagagtagtccactgcaacgtatgtcagcatgaagttgatggtgacgatgggggccagaacgttcacttgacccacaaaaacaaaggccatggtcaccaagctggtcaggcagatggcagccacgggtgttttgtttggccccttcccttgtcccagacaggcaagtgcagggatcactttctcctgggcaatgcactgcaggatgcggggagctccataaagtcctcccatgcaggaagccagggacgagatgtataagcccaaaaggaacaggaagcccatgagggataccttttccgctatcaggaagtcatagcgaagggcctctcgagtgcagatggcgcccaggaggaagacgaagacgatgtacagaaaccacgagatgccaacag

SEQ ID NO: 9347 - DNA, 527 bp, Homo sapiens
  misc_feature (1)...(527): n = g, a, c or t
ctgagctgctgtctgctttggaaaaccgttcctgccgctgccgatggatggaaatgcaatggatttcancttcttatcatcagccagggccaagcagtttttcactgtcttttccagaagttcttcacacttgtctgcatcccaaactggactattacagnggatcacaaacttggcaggcaggccatggcctgcgctgacagcagctccagctacttccaagggcccgttctttttccggagttccaggacagcttccacaaactcctcatagtcgatggtcctgtccccatccttgtcggcctccttcatcatctgctccgcctccacctcgttgaggggctcccctgcgttcattagcacgtacttgagtgtgttccagtcaatgtagcccttgccctctttgtcaaagacacggaatgccgccctcagctcgctctcctggttctgggccttctcatggtaaactcccattagtgccaggaaaccatcgcagttgaagaaccctttgttgnctctgtccacat

SEQ ID NO: 9348 - DNA, 288 bp, Homo sapiens; identical to SEQ ID NO: 2745

SEQ ID NO: 9349 - DNA, 580 bp, Homo sapiens
cctgaggatagacagaatgactcagaaaactccttttgaatgcagccagtctgaggttatgtttctgagcttggacaaaaagccagagagcaagagaaatgaggaagcttgcaacatgcccagttcttcttgtgaagaaagttggttcccaaagtatatagttccatcccaggacttaaggccctataaggtaaatatagatccttcttcagaagctccagggcattcttgcaggagcagtccaaagatggtgacaagtcttttttcttttactttcaaggcagttttaggaagcattccctgtctatcttccaaatatgatctggattttaattttgcaaaaaaaatactgcattttctcacttaaaaagtaggagctaaatgatgagaacacgtggacacatggagaagaacaacacacagtggggcctttcagagggtggagagtgggaagagggagaggatcagaaaaaataactaacaggtactaggcttaatacttgattgatgaaataatctgtacaacaaacccccatgacacaagctgacctgtgtaacaaacctgcatttgtacccctga

SEQ ID NO: 9350 - DNA, 299 bp, Homo sapiens
ctggatttattacttataagtttgctattaacctggtatagctgtattttaatactagggtcatcagatgaagaaagcaaatctaaacaagaaaataatgtcctggttatgtgattatcacatacaggtgggagtacctacaggaagggggaagaagtgaaataattttgaagggacaagcctaaacagtccgagtgggtttccgagtgtgcaaacagtggaaccttcagagattatttttacaaaagaaatgatcagactactagcctgtgtctttgaataaccatccattccccttt

SEQ ID NO: 9351 - DNA, 413 bp, Homo sapiens
tgaaaatcgaatcgggtgtgatcctaggccaagctcatggcccagcagggccagcaggggcagatggcaagtggagacagcaatctcaacttcaggatggtcgcagagatccagaacgtagagggtcagaacctgcaggagcaggtttgccctgagcccattttcaggttcttcagagaagacaaggtggagattgcaagtgcaataacaaggccatttcctttccttatgggcctccgagaccgctccttcatctccgagcagatgtatgaacattttcaagaagcttttagaaacctggtcccagtgacaagagtgatgtattgtgtactcagtgaactggagaagacatttggctggtcacatctggaagcattgttcagcaggattaacctgatggcctatcctgattt

SEQ ID NO: 9352 - DNA, 146 bp, Homo sapiens
aatgacgccgtcatggcacggggaacatttgccaacattcgcttgttaaacagatttttgaacaagcaggcaccacaggctatccatctgccttctggggaaatccttgatgtgtttgatgctgctgagcggtaccagcaggcagg

SEQ ID NO: 9353 - DNA, 391 bp, Homo sapiens
  misc_feature (1)...(391): n = g, a, c or t
ctgttgtagtcccaaactctgggctcaagcagtcctccaacctcagcctcccaaagtgctgggattacaaatataagccactgtgcccagcccagttctgtttttttttttagatggagtcttgctgtctcccagcctagagtgcagtggcacaaccccagcccactgcaaactctgcctcccaggttcaatcaagcgattctcctgcctcagcctcctgagtagctggcattacaggcatacgccaccacacccggttaattttttgtatttttagtanagacggggtttcaccgtgttagccangatggtcttgatctcctgacttcatgatccgtctgccttggcctcccaaagtgctgggattacaagcgtgagccgctgcacctgg

SEQ ID NO: 9354 - DNA, 340 bp, Homo sapiens
ccagggcccctgcagcctgcctgaatttcaactgcatgctgattctcttgccagtctgtcgaaatctgctgtccttcctcaggggttccagtgcgtgctgctcaacaagagttcgaagacaactggacaggaatctcacctttcataaagtggtggcatggatgattgcacttcactctgcgattcacaccattgcacatctatttaatgtggaatggtgtgtgaatgcccgagtcaataattctgatccttattcagtagcactctctgaacttggagacaggcaaaatgaaagttatctcaattttgctcgaaagagaataaagaaccctgaaggagg

SEQ ID NO: 9355 - DNA, 304 bp, Homo sapiens
  misc_feature (1)...(304): n = g, a, c or t
cctcaggaaacttacagncatgacagaaggggaggcaggcatgtcccacatggtggagcangaggaagagctcacctacagcaaattatttaagaccgagcatttgtctctgttctgttccctctctggacgcaccctcctgcctccaccctgacttgccgtctcctgagcactgaagatatttttggcttgtccgatgtgactccacagacagcagaaacgcttgcttgatcagggcagcatcagggcaccacacatgcctgggcttgcacaacgcancgggagcactgccactcagcagcag

SEQ ID NO: 9356 - DNA, 297 bp, Homo sapiens
ctgagagaggctgaagagattctgcaagtaagcttccacgcagaaggtgttggaaagactttgagagtcccccagctttctgaccctggcttttgtggagaggtctgggaagatgggagatagtgagctcaaagaaggagaagataatggcgtatgtcccacattttctcccagggtatggcagcctccctaatacccttataagctaggaagctcctaggatgctgcagctcagtcaccatttagtaatgtctggagagatttgtggttgtcctaagagtgggagggtgctgcagg

SEQ ID NO: 9357 - DNA, 230 bp, Homo sapiens
  misc_feature (1)...(230): n = g, a, c or t
gtacaagctttttttttttttttttttttttttttgggacanagtcttgttctgtctcccagtctggatggagtgcagtggcgccatntcggctcactgcaacctctgcctcctgggctcaanaaattctccctgcctntgcctccanagtagctgggattacagatgcccgccaccacgcccagccaattttttgcatttttagtagcgacggagtttcaccatgttgg

SEQ ID NO: 9358 - DNA, 373 bp, Homo sapiens
ccaacatggtgaaaccctgtctccagtaaaaatacaaaaaatagctgggtgtggtggtgcatgcctataatcccagctactcaggaggctgaggcaggagaattgcttgaactcgggaagcagaggttgcagtgagccaagattgtgccactggactccagcctgggtgacagggcgagactctgtctcaaaaaaaaaaaaagggaaaagaaaatgtagatttccattgtccaaagtgacagcgggaggatgggtcttgagtttctcaggttggagaagcagctccacgaaggtcctgagcttgggtccactgtacatgggacagctccaaaagaggaaggtcccagcactgcatctagtggtgaggcatcag

SEQ ID NO: 9359 - DNA, 222 bp, Homo sapiens
  misc_feature (1)...(222): n = g, a, c or t
ccttcaactgtcaagacaaactttgcaactggatcccggtgggacagtgccctgcagcgaggagtactgtatatgccaatgagagggcccagcttctangaaccgttacaatggcgtcccgagtcattttccctntcccacttgcattcgagagtgagaaaacacacaaggtggccttgattctcactcaccacaatccccntgtacanaggggtctgtttc

SEQ ID NO: 9360 - DNA, 323 bp, Homo sapiens
ccttggcatggaggaggcggcctctcctggcaactcaccaatggggacttatcattcatataaaccatggggtcctgcagaggaagaaacaagagtgaaggactaagaattctggagctgaaagcaccaagaatgcaggggacccttgccccagccacctggggaggtggaagaggacacagatgggtgcagggcaccgacatccttcctggggtgctcaccagggacttctcctcctgcctgagccactggtagtcctccaccatctgcttctgctgtttgtccaggatttgccgcattttgaccttttcagcctcccacag

SEQ ID NO: 9361 - DNA, 290 bp, Homo sapiens; identical to SEQ ID NO: 159
  misc_feature (1)...(290): n = g, a, c or t

SEQ ID NO: 9362 - DNA, 232 bp, Homo sapiens
cctagtatctggcttgtgttttttgggtataacgtggtgactccacagcctctccagctcaggacagcagggctttgaaagcagagaatttgggtatgaatcctagattttccaatgactaactctataatatggaggagttctatctgattatcctcgaatcatcctttgtaaaatggaataatatgcttctcttccttcgatttgttgtaaggagccaatgaaactgtgg

SEQ ID NO: 9363 - DNA, 529 bp, Homo sapiens; identical to SEQ ID NO: 552
  misc_feature (1)...(529): n = g, a, c or t

SEQ ID NO: 9364 - DNA, 293 bp, Homo sapiens
ctgccacagacacccccttcctgtttgaagactgagataatgtctcccctgtaccaagatgaagcccctaagggaacagaggcttcttcggggacagaagctgccactggccttgaaggggaagaaaaggatggcatctcagacagtgatagcagtactagcagtgaggaagaagagagctgggaacccctccgtggtaagaagcgaagccgtgggcctaagtcagatgatgacgggtttgagatagtgcctattgaggacccagcgaaacatcggatactggaccccgaagg

SEQ ID NO: 9365 - DNA, 308 bp, Homo sapiens; identical to SEQ ID NO: 4308

SEQ ID NO: 9366 - DNA, 373 bp, Homo sapiens; identical to SEQ ID NO: 6

SEQ ID NO: 9367 - DNA, 444 bp, Homo sapiens
cctctgcgattttgaaggacaactgctgctaaggagtctatctgtgattggagggttgaaacagtattaggtaagtcttccaaactgtttgtaagatcttgtgagagggagcaatagtacatgagggaagtagaaagcccgaccactccggttccaactgcagtagtcattcctagtcgtactaggatgggtattaactgaacggccctgcattggcacacttgagtttttacagggataggtaggttttgtttcctgggacaatgtcgatttttgggcttagaaaaaccagagtacaggtaccagtccagttgatagggtagcagaggtaggtggaggtaccgcacaggaagaatatgccttggctaggtaagtaaaattggttgtgtatgttaaaaagatgtgtaagcttgtggtctttgtatatccatgctcctagggtgc

SEQ ID NO: 9368 - DNA, 445 bp, Homo sapiens; identical to SEQ ID NO: 4402

SEQ ID NO: 9369 - DNA, 441 bp, Homo sapiens
  misc_feature (1)...(441): n = g, a, c or t
ctgtgtgcggcgacgagagagtgtagaaataaagacacaagacagagataaaagaaaagacagctgggcctgggggaccactaccaccaatgcgcggagaccggtagtggccccgaatgtctggctgcgctcttatttattggatacaaagcaaaaggggcagggtaaagagtgtgagtcatctccaatgataggtaaggtcacgtgggtcatgtgtccactggtcagggggcccttccctgcctggcagccgaggcagagagggagaggagacagagagaaagacagcttacgccattatttctgcatatcagggactattagtactttcactaatttactactgctatctagaaggcagagccaggtgtacaggatggaacatgaaggcggactangancgtgaccactgaagcncagaatcacagggagacggttagg

SEQ ID NO: 9370 - DNA, 493 bp, Homo sapiens
ctggctaattcagtcatgcaaactctgctctcacagttaaaacagttctatgagccaaaacctgatctgctgcctcctctgaaattagaagcttgtattctgacccaaggagataagatctctctacaagaaccactggattatctgctgtgttgtattcagcattgtttggcctggtataagaatacagtcatacccttacagcagggagaggaggaagaggaggaggaagaggcattctacgaagacctagatgatatattggagtccattactaatagaatgattaagagtgagctggaagactttgaactggataaatcagcagatttttctcagagcaccagtattggcataaaaaataatatctgtgcttttcttgtgatgggagtttgtgaggttttaatagaatacaatttctccataagtagtttcagtaagaataggtttgaggacattctgagcttatttatgtgttacaaaaaactctctg

SEQ ID NO: 9371 - DNA, 261 bp, Homo sapiens
ggcaaaagaagatctgacagctcctatataccttatcttactgaattcttaaactttgaaccagttcttccacttactgacttgttaccactgctgactttctgaaaagttttccagtttttgttttttgttttttgttttccagtaggggattagaatgtttagtcctacttagtaagaaaaatattgtatcaaattacctttaggctatgtatataaggtgtatatgaagcataaatgaatttcatgtttagtcttgag

SEQ ID NO: 9372 - DNA, 158 bp, Homo sapiens
ccgaccgcgagccgtccaggtctcagtgctgtgccccccccagagcctagaggatgtttcatgggatcccagccacgccgggcataggagcccctaggaacaagccggagctgtatgaggaagtgaagttgtacaagaacgcccgggagagggagaag

SEQ ID NO: 9373 - DNA, 618 bp, Homo sapiens; identical to SEQ ID NO: 334
  misc_feature (1)...(618): n = g, a, c or t

SEQ ID NO: 9374 - DNA, 274 bp, Homo sapiens; identical to SEQ ID NO: 160
  misc_feature (1)...(274): n = g, a, c or t

SEQ ID NO: 9375 - DNA, 242 bp, Homo sapiens
ccactaccccaacaccatcgctgagaaacacggcttcagggacctgcggcagttcatcgacgagtatgtggaaacggtggacatgctcaagagtcacattaaagaggaactgatgcacggggaggaggctgatgctgtgtacgagtccatggcccacctttccacagacctgcttatgaaatgctcgctcaaccccggctgtgacgaggatctctatgagtccatggctgcctttgtcccag

SEQ ID NO: 9376 - DNA, 591 bp, Homo sapiens; identical to SEQ ID NO: 639

SEQ ID NO: 9377 - DNA, 404 bp, Homo sapiens
ctgtgagcctcagagctcctggctgcctgttgctgagtctattagctgctgagccttgatctttgtgtttctaagatttgtcctagtccatttatggatctaattgtcgctcttaatttctttacatcttcttctggaaccaggtctgttttattaatgagaatggcatctgccaaagcaacttgcctagtagcttcattgataaggccatcaggtttctcttctgttaaatgttttaatccatattttgaatccacaatagttatgataccatcaagataaatatcactccctaattcagcatcaacccaaaacatagaagccactgcaccagggtctgctaatccagtggtctctaacagtatgtaatcaaatttccccttcttttgcatcaaattctcaat

SEQ ID NO: 9378 - DNA, 428 bp, Homo sapiens
  misc_feature (1)...(428): n = g, a, c or t
ctgcagtaacttttcaccccatcattataccagtgctcatctgactgatgaaaaagaggaaagaataatcatttctagatactgaggttgcgaactagttctgtggcagnggactancataagtggatgtctaagaaatttttcagttcactagactaaaatgttttacaacaaaaagcctccagttagcctcctttctagagtatatgttcagcaatgttgatctcataaaaggaaaaacaaaagatttaagtattctatataccaagtttttgttttgtttttactgnatttattttattgaggntctttatattcctgcctcttcatagtcaaggctcttagtacaggaatattgacttaggaattgngaaaactccttaagtttcttaagttaaggatgtttggcttttttctttaattttttt

SEQ ID NO: 9379 - DNA, 293 bp, Homo sapiens
  misc_feature (1)...(293): n = g, a, c or t
ccacacctggngttctggaaaagggagtccagggccantattnangccctgctgtactgcaccctgnaaactgcaccaaaccccanctccgcccccatccacggntcccanaatggtttctggagtccctgcancagacctgtgaggagagggcanggcagggcctgcctnctgcgtccccgngatgacctgggggatgcactgggcagggacagcttcctccatccacacagccctgtgggcaccaacaaggccnctgtgacttcacgcgacagcagtgtnccccagctcag

SEQ ID NO: 9380 - DNA, 378 bp, Homo sapiens
aaagtttgcccttgtgctaaagtgccagtgtatgtatgttatacttgatttggttgtaaactatatttcaaagtaaaccctagtgtaataagttttataactaaaaaggtttaagctgctaaaactatttttaagagatgtgaaatgcagtatgggactatctttttttcctcctctaagcccaaagattaactagagtccctccaaccttatagattgttggctttcacaatcttataacctaggatacaggtagtttcgagtatggtgccagtgatgttttgtttttgtttggtcaaggggtaggtgcaacccaatggaccacttatgcaaaagatgtaaactcttgcataatacattgataacatgttttgccaa

SEQ ID NO: 9381 - DNA, 569 bp, Homo sapiens
ctcagataagctgacatttgagcagagacctgtgctaagtgagggagtgtgccatgaggatatctgggaagagcaccttgggaaagggtcagcaagtgcaaaggccctggggtgggagtgtgcctggcatgcttgagaaagagcagagagaccagggtggctggagtggagtgggagaggggtgaacacataggaaatgaggttcagagggtagatgggggccagatcaggaggccaggtgttaactgtgagcaaagtgggagctgcaggaggagtgagagcagaggacagatgggatctgatttgggactgggaaaggcagagaggcttgcatggcagtggggcccatgcctgccttctggtcagagtagatttcggggagggcctgagggactcctcaggtcctgtgccagcctgggcccccaagaaggcagagctaggggtgaaggctggctccccttccgggaggcccgcaggcagcggtcgcttgtccaggcaggaggatgttctcactgactcggaggaaacagcgtgtcccacatcaaaagggggccgggtggctcccacgc

SEQ ID NO: 9382 - DNA, 188 bp, Homo sapiens
ctgccccgaggccaaggctgcgctgaacatgcccagggcctgctggaactggggcgaggtcagggtattctggatctcatccgcggtctgcggcagcgactccccagatggcaagcagggaagcaggcgctcctggacatccgcgttggcgaggatgggagccattatctccggcgtcagcacactgg

SEQ ID NO: 9383 - DNA, 267 bp, Homo sapiens; identical to SEQ ID NO: 4373

SEQ ID NO: 9384 - DNA, 349 bp, Homo sapiens
aaatcgaaagatggtgtggcttcattaaaaacagtagtgaccaagtcactagcttgatctattgttaaaacattgttgtttactcgattaccaacttcaatatgtacatcagctaatgatgatataagttgtttacattcattctgcattcgtgtgaatggaacggcaatttcgtcataatataaatgttctgaaaggatatcaagtaaacgcggctgcacagctaaggtaacagctttacactccttttgtaaagcagcccattcacagattaccaaagctacactaatcctctgtaaagcagacttggagttcaaatggaagagtagtaactggcccagggattcag

SEQ ID NO: 9385 - DNA, 181 bp, Homo sapiens
gtgtccatgtacctcttccgggtaacagtgaccagtgactcccccaagctctggatcctggtattgggagctgtatttggtttctcctcgtatggccccattgccctgtttggagtcatagccaacgagagtgcccctcccaacttgtgtggcacctcccacgccattgtgggactcatgg

SEQ ID NO: 9386 - DNA, 301 bp, Homo sapiens
ccagacttggtgctctccatagagcagtctgggattatcttggagagctgcacgatccagttgttgatcttgtctcggcggcgacgctccacttcattatgctgagccctgcgtttctcatcccgagtcgtccggggagcttctgacttcggggaataagggtgagtcctaggggcaattgagcgctggcttcctccctgcagtacttcttgtggtgacatcatcacaaagaattgaccagtgccaggaggggtcgcctgccccagcagtgcctctgagccctgggtagtaacaacagcag

SEQ ID NO: 9387 - DNA, 531 bp, Homo sapiens
ctgctccatgtccttcacctctgccagggcctcatcccggagaaggcccatctgctcgtggttgtagaaggggcaggctgcctgcttttcctgcctcctcctctttggcttctcctcctcagctcctttcttcttctctgagggtggcacaggcacaaagagagaaaacagagaggacagcaactgtccacgggcccgagagggggttgtgtaatgttgagacccacttccacagggtggggtctataagaccctcccaagtactgcctactgtgtctcatcggaacactgtaaggttttacttttgttctccagaaagagcccgtaaaatcatctccaagccaacgattcggaccagacgctcacccagagagtaggaacactttttcccaaggagaggggactcaggaaggaactggggtctcctctgccattctttctatgaaagacacttaatggtcttcagtcactgccacccctgcctcactctctccagaccacctgcggctacaccatggtcctggtggctac

SEQ ID NO: 9388 - DNA, 289 bp, Homo sapiens
  misc_feature (1)...(289): n = g, a, c or t
agtgctgaataaatctcttgctgaacaaagacagcatgaggaagcgaataaaaccnaagatcaagggaagaaagggccnaacaaaagctngagaaggaacaaacagggtcaaagactctaaatggaggatctgatgctcaagatggnaatcagccncaacataacggggagagcaatgaagacagcnaagacaaccntgaagccnncacgaanaaaaagccntccnntgaaganagagagactgaaatatctctgaaggattctacactagataactaggntgacatac

SEQ ID NO: 9389 - DNA, 375 bp, Homo sapiens; identical to SEQ ID NO: 161

SEQ ID NO: 9390 - DNA, 389 bp, Homo sapiens
aaatgtataaataatgtgtacctgtgcacataaataattaaatggggagagagaggaaagaaaaagatagaggagaaaactaaagtgctgtccttttgaagtcaacattacaagtacatgagattcctgtgttaatttaaggaagactttcctgttggtttgttgaatgctctgtgtttcctctgtaatgctttcttagctctttctattgtttcctcaggcattatttcattttcccagttactgtatatttgtacctgcttctggtatgttaagtcctttatcttctggcatgaaccacttgcccattccatcagtgtgcactgcttcttccagtgtcctacgtcaagtgttcactcagagacgcttctattctcatttccagttgg

SEQ ID NO: 9391 - DNA, 269 bp, Homo sapiens
aaacctcacttaatggatgtagtatatacctgggcaactggagctacatttgcccatatctgcaaaatgacagatgtctttgaaggcagcataattcgttgtatgaggcgcctggaagaattgcttcgacaaatgtgtcaagcagcaaaagccattggaaacactgagctggaaaataaatttgcaggaggaatcaccaaaatcaagagagatattgtgtttgctgccagcctctacttgtagagtcagctaaaggaatgtgagatttt

SEQ ID NO: 9392 - DNA, 571 bp, Homo sapiens
cggaatatgacttggacaatctttaccagaagccatccgtaagcccctcagtcacactttccatgtagctgaccagtgactacaggatgtggctgacagtgctcactgaaaggagagttggtgcgggactggtggttctgagcacatagacgcctattagtccttctggtcagtgaacgaaaattctagacctacagttactggctacttgcatttgtcagtttagagaaaaggtaaaatgaggcgttttcaattgtagaatagactaacatttaccacagaagtgcttcagcattctaaatggattagatcactcattaagctatttttatatgccaatttactaatgccttacatcaatccactaataggttgttgggcccgcagtagagtccctatgcagtcccaattctgttttctgtaaccatgtgactggtgatgcagagtgataaccatgtctgcctatcttgtactagactcttcatgctgatcggatcttgcattgaaataaccatgtggaagaacaatgaatcgattaatgatgacatgtacaaccatatttacctcggcc

SEQ ID NO: 9393 - DNA, 265 bp, Homo sapiens
ccagggcctttgcaaacaagccaggccaaaaaggctcaacatttacaccggctgctttaatgagggcattgatcttatcctccgtgactgtcacctcatcgtcgtgcagaatgagggccgagtagatgcaggcgagctcggagacagaggccatggcgcgggcgagtgtagggctggcgctgccggacgcggtgctagtcgccggatgaagtgagggcctcaccccaacgcagccttagcttcctcggaaggaccgagcaccttg

SEQ ID NO: 9394 - DNA, 466 bp, Homo sapiens
aaatgagggcaacaggagatcagagatgccaagagatgttggaaaacagaactggctgaagaaatgacaactgaataaagaggggtgaagggagctgtgaaccacagcaatgccaagagggcatccagccaggcagagtggtctactaggcagagcctcagagaggggaggagttcaccagacccacgtgccatatgggattcatgccagccttgagtctacaccagtgaaaaaaatcagagagttcatgactgaagcaatatgccccagaaataatatctttgtattctgacacttcagtgggttcccattcaatcaccctacagggaagactgccagtagacctgccccccaccccgttcaatatgaatagatctaggatcagaaattggagaaaggtgaaagtggggaaacagaccaagatgaccaaatacaaaaggagtccagaacaaacaagtaatttttt

SEQ ID NO: 9395 - DNA, 392 bp, Homo sapiens
acgaggtcctcctcgctctggccgctcttgctgctcctgtctgaagaaatcagactgatttcctcttaagactcctagggatgtggtgaagagctgggactcaagtgcagtccacggtgtgaaacatgagggaggtgaggtgtccgtccacttcccccataaaggtgtgcatttcagttaggctgccccgctacagagcaggcttcatctgctctgccatccagccccatctggatgtgaggtggggtggagacatcatggggtgattgcagaaagggggagtggcggcccacgcagcttctgctgaggagctgaccgctctgagctgttctgtttcgtattgctgctctgtgtctgcatgtattgtgaccgtgcggctccacctcttccag

SEQ ID NO: 9396 - DNA, 459 bp, Homo sapiens
  misc_feature (1)...(459): n = g, a, c or t
taattgaaatcctnaaaggaatgcaagaattgggagtacatgnntgatcaggaaacatatacagattatgtgattccatgctttgatagtgtaaactcagcacgagccattttgcaggaaaatggatgtctgtctgatagtgatatgttttctcaagctggattganaagtgaagcagcaaatgggaacttagactttgtattatcatttttgaaatcaaatacattgcccatctcgctgcagtctataagaagtagcctactgctaggcttcaggaggtctatgaatataaatctttggagcgagataacagaattgttgtacaaggatggacgttattgccaggagcctcgaggaccgacggaagctgttggctattttctttataacttgattgacagcatgagtgactcagaggtacaggccaaggaggagcatttgagacaatacttccatcag

SEQ ID NO: 9397 - DNA, 216 bp, Homo sapiens
  misc_feature (1)...(216): n = g, a, c or t
acatcctaatatatggatcttgatttttaagtttcagtatctgaacttnntaaatnagtaacttttagctgggaaagtatagcatgaaaccagaggttctcanaatgactgtaagatagcttacatttcctntttttgcgcggtgctagtcgccggatgaagtgagggcctcaccccaacgcagccttagcttcctcggaaggaccgagcaccttg

SEQ ID NO: 9398 - DNA, 305 bp, Homo sapiens
aaaacaaggcttggcaccctggcttatgcctgtaatcccagcactttgtgaggccaaggtgggcggatcacctgagctcagaagtttgagtccagcctggctaacatggtgaaaccccatctctaaaagagtacacggtcctagagcagtggtgtgcgcctgtagtcctagctacctgggaggctgaaccaggagaattgcttgagcctgggaggcagaggttgcagtgagccaagatcgcaccattacactccagcctgggtgacagagagaggccctgtgcccctcaaaaaaatgtttttttt

SEQ ID NO: 9399 - DNA, 327 bp, Homo sapiens
cctggaagcccacggggtgcagcatcctcaagcccaggggcgggagcgcctccggcctgccctccagggaagctgcatgtggacctccacggtattcagcctccagtttagtcagccttgagtctgggctgctcccgcacctggtgttttatgcgtgtgatatatgtgtatccatcctgcttccctgccttcaagggaagacttaactctccgagagaaaacctgcctggagctgcgcacattctcacagcttgagaacgcttgacgcaggaagtcaccagagtactcaagtcaaccgcaaactagtggttacaaaatgggagcttt

SEQ ID NO: 9400 - DNA, 457 bp, Homo sapiens
ctggctttcagagcctttccctgccttctggggccctgtgatccctcatgcctacttctttctctcttggtcagccttgtgcgcatgccctctcactcttcatctcttgggcctgtctctgtttctccttggatgttcttctattattcccctctctccatcctccataaataaataatttaatttttttgccttcataaatagtcccctccctgcctctagtcatcccccaagctcctccatgtgcctgctcttcctctgtgtgtggatctaggccccacctagctggtgggacagaccaacagctttgggctgggaattcctaggcaggcttgaaatcctcagccagacagacatcagggatggttcagggaggtgtggtcccctgggatgcctagaattccttctttgaaagctccggtgacttgatcagggaagacttgagctgttggaatgg

SEQ ID NO: 9401 - DNA, 288 bp, Homo sapiens; identical to SEQ ID NO: 162
  misc_feature (1)...(288): n = g, a, c or t

SEQ ID NO: 9402 - DNA, 153 bp, Homo sapiens
ccatggatgccagccgcttggcatccaggtcaaaggcaaagatccttggttcttcagaagagcagccaagtgactggtcttattgcctggggcggcacaggcatcgatgacatgggagcctggcgggggtccagcagcatggctgggagacag

SEQ ID NO: 9403 - DNA, 297 bp, Homo sapiens; identical to SEQ ID NO: 163

SEQ ID NO: 9404 - DNA, 382 bp, Homo sapiens
ggcttcttgcaggccaagcccgagaaggcagcagtggcccagaagccccgaagccacttcacgacacctgcccctatgtccagtgcctggaagacggtggcctgcggggggaccagggaccagcttttcatgcaggagaaagcccggcagctcctgggccgcctgaagcccagccacacatctcggaccctcatcttgtcctgaggtgttgagggtgtcacgagcccattctcatgtttacaggggttgtgggggcagagggggtctgtgaatctgagagtcattcaggtgacctcctgcagggagccttctgccaccagcccctccccagactctcaggtggaggcaacagggccatgtgctgccctgttgccgagcccag

SEQ ID NO: 9405 - DNA, 297 bp, Homo sapiens
aaattccaaagcactcacaaaattgagcaaacaaagccactatttgcatatttgggaaaggaaacatattgctaatggaagccacaggactggtacacaggccccactccctccagctccattcccaagcacaaaattcaacagacccagatcctaagtcaaccaagtgactgctatgacaaaggcttgggttattgacatttacttacatacgtgtacaagacctagagtttgaaaataaatggagaattctaccccaaagcctccacctcagtgaagacctgcgggttattgcag

SEQ ID NO: 9406 - DNA, 342 bp, Homo sapiens; identical to SEQ ID NO: 306

SEQ ID NO: 9407 - DNA, 230 bp, Homo sapiens
ctggaggatcccggggcagggacacctagcccggtgcgtctgcatgccctggcagggttccagcagcgagccctgtgccacgcgctcactttcccttccctgcagcggctcgtctactccatgtgctccctctgccaggaggagaatgaagacatggtaccagatgcgctgcagcagaacccgggcgccttcaggctagctcccgccctgcctgcccggccccaccgagg

SEQ ID NO: 9408 - DNA, 512 bp, Homo sapiens
cctcctgctgtggactgctcttcttaggacaacactggctccacacaagtcagcgaggatggggtcatctttagtcaacatggtttcaggtgtaagttctcaggaagtgtttgttgaatgcatgagtggacaaaggggaggacaatgaaatgagacggaattccgtgtgtttcctgggcagttggtgcaggtgttcctctctcaggaatcacagcttgttaaaggtcatctgcctgctatggacaggggctcccatgactcgtctggaactgtatcacctcccaaagcctggtgatttcaggctcattcttggggtagacaccacctcctgagtcccttcctttggttaccctgctgtccaagggccccacgttggggtgcctactcacccaggtccatgtttcgagtccgggggttacactgcttgtaacccttgcagctcctcagctccatgagctgtacgtgtagctggttgaggacatccctgtccagtgtgttcactgcattcatca

SEQ ID NO: 9409 - DNA, 308 bp, Homo sapiens; identical to SEQ ID NO: 4688

SEQ ID NO: 9410 - DNA, 300 bp, Homo sapiens
aaaaagcaagttactgtccagccaggtagtcggacacggaccaaagctggcagaggaagaaggagaaaattctgaatttctagggtccaaaagttgacaaaaccattagtaggaggggtgggccatgttcattaagccatagtggtccctagttcattgttgagcaagttttagccctgcagttttcaccaccagcacctacccagcattctggtttttatgttttttatgatctatgcagacaactgtgtattctgttttataacagtttgtttgaatttacttacagttaaaaaattt

SEQ ID NO: 9411 - DNA, 75 bp, Homo sapiens
ccaggatctcggcgcatagaccactctgccccagcggtcgtcacagaaaggtctctctgttccccacactcagca

SEQ ID NO: 9412 - DNA, 335 bp, Homo sapiens
cctgatggctggaccctgctcactgctgttgtgggaccctgaaccctcccttcaccttgcttgcctcctgcctcggaagctccttgggtgtgggtgaagcccgaggctgctcctgtggaagtggctctgggcaccagcctgtggggctaaagacttgacagctagctctggagcagccggcttcctggaaaacctccaggtttcgcataccagggatggcccctggcttggcctgcgaaggtgaacctgcccagatttatcagtagaggctggactccctctgtgtcctgcccatggttgcagcagccatgggcctatgagcggtctaactgtgg

SEQ ID NO: 9413 - DNA, 551 bp, Homo sapiens
ccagccagtgacagaaaaaagagtgaatgtgcctttaagaagaagagcaatgagacacagtgtttcaacttcatccgtgtcctggtttcttacaatgtcacccatctctacacctgcggcaccttcgccttcagccctgcttgtaccttcattgaacttcaagattcctacctgttgcccatctcggaggacaaggtcatggagggaaaaggccaaagcccctttgaccccgctcacaagcatacggctgtcttggtggatgggatgctctattctggtactatgaacaacttcctgggcagtgagcccatcctgatgcgcacactgggatcccagcctgtcctcaagaccgacaacttcctccgctggctgcatcatgacgcctcctttgtggcagccatcccttcgacccaggtcgtctacttcttcttcgaggagacagccagcgagtttgacttctttgagaggctccacacatcgcgggtggctagagtctgcaagaatgacgtgggcggcgaaaagctgctgcagaagaagtggaccaccttcct

SEQ ID NO: 9414 - DNA, 134 bp, Homo sapiens
  misc_feature (1)...(134): n = g, a, c or t
ccttgacaattaggcagggagaagacctggatgtccatcccatctgataccctgacttcccaagagaacaacccattcttctcanatttctcccaagtccctcattgctgggcctggangctcgctttggctcc

SEQ ID NO: 9415 - DNA, 210 bp, Homo sapiens
  misc_feature (1)...(210): n = g, a, c or t
cctgggatgcagggagaaaggctgaccacaagttgagacaagatacagaaacaaacaaaaacaacagaaagtccgatcgatggtgtaagtgttgtgttcactgcttagggtgcaggtgagcttgatcgaggctcccagcaaggcagatgtagacgggggctgagtcagcncaggcagagcacagagacctgtggagaaaatgaagggcng

SEQ ID NO: 9416 - DNA, 206 bp, Homo sapiens
  misc_feature (1)...(206): n = g, a, c or t
aaacttttgagttgtagtcagaaactgttgttggactgcatagttttcaaaagtttttggtacatttctgactttagaaatctggggtaggaatccctttccatatgcatatagactattttctgagcttcttcaaaacatgtttcagtgggttcctgaatgttcctgatgatngtctctcttgtcgaactgncaatgttaatctc

SEQ ID NO: 9417 - DNA, 188 bp, Homo sapiens
aaattcaccaacaactgggttcactgccaacaactacaaatgttcaattctgtattagtgtacatgtcattacagttggtttagatggttaatataggaataaataaaataactacagttcaaacaaaggaaattaaaatgagattaaagagccccgatcaaaaaaaaaaaatacttacaactttcag

SEQ ID NO: 9418 - DNA, 618 bp, Homo sapiens
  misc_feature (1)...(618): n = g, a, c or t
aaactgtaatagttctttatattcaggtaaattcctatacatgataggaatactttcgtcatctgatgcatcttcaacagcagtgttcatgtggctatgaaaacaagatcggtcatcatcttcatccatatacactggcggttcatgtgaagtcatgaaagtggaaggcttaaagagatgcttattaagagggtgctgtcgtctgcttgttgaagactttttggagtatatatataagtttggtgttctgcctggtactggaatgccagctttagttagctttatgaaatacttctgtactcggctggcaacctgttttgctgtcctgttgcccaattcatctgctatcttctgccagcgtcgagattctacttcttcaggagggtatttgatgagtagctgttccagctttttctgttcttcaacagtccacaactggttaaatgtttcaggtttggtatcatcacacaagcgtcctcttatcatctgaggacgactgcttgagccttctggaccatcactcaaaggcaacatagaatatgaaagggactctccatccttcttaggatctaaaggactttttggtctancaggtaaacctactttatcaaaaactgg

SEQ ID NO: 9419 - DNA, 259 bp, Homo sapiens
ctgtgtggtcctgagctgtcacctcttccctttgaagctcaggttcctcatcggtaaaatgaggcagaaatactcactgctgagatgtgtgaggatcgcacaaactcagtgtctcaacatgttgtacgtgtgttttggccctctgagcccttgagggctgccccaggtggaaccctcttcacttttcttggagaactgaccatgggttgcagcaaagcctaaaatggttcctgtttcagccctgcctgggaagattcag

SEQ ID NO: 9420 - DNA, 395 bp, Homo sapiens; identical to SEQ ID NO: 164

SEQ ID NO: 9421 - DNA, 464 bp, Homo sapiens
  misc_feature (1)...(464): n = g, a, c or t
aaagatactggattntncnaagatttctgatttacactgatatttttttttgccattcttaattgcatcacacaatagatgtaaatgaagatgtagtcacctcagataaaattggtatcgngtatgataatattgtatcatttatatttgccttatgttaactttaagaaattgatttttttgtattaatcattttcccattgcaacagagctatattttttctattttaagaattatattttaggattatttttggcaaatacagtgagcacttatgtaaccagatgataatgaactcaaatgtcatgatggcttgcataaatggtgactctagtagatttgactcaagcacttctagaatcatgcactgaattcaaaagaaaaatcttgctgctttttgtccagggcttgttctattcaacttctaatttgaaagctgtacaaagtaatagaagttccattt

SEQ ID NO: 9422 - DNA, 347 bp, Homo sapiens
ctgggttggcacaggctttctccacttctgggcctacacagtccttcaagaacagaacatccttgcccagcagagatttgagttctacagcaactggctctaaggagtacttgtcaggcatgggcacaccatcaggccggcctaggtggctcataaggactaccgacttggctccattgtccaagcagaatttgatgcttgggacagcagccttaatcctctggttgtttgttatctggttgttcttcataggaacattgaagtcgactctcataacgacccgcttccctttaacgtccagcttgtccagcgtcagcttgttagaaagcgacattttggaaatacag

SEQ ID NO: 9423 - DNA, 310 bp, Homo sapiens
aaaggatggcctggcccccagtaaacgccgattcctgctcgcggccttctacgcccattactggagcagcagccatcagtgtagacgacgacgaagtctcccatgtaggaaaacgtgtctctgctaactggaggcgccggctccacgctcggcttcatgtgctttgcatacggctctgcgctttcatgtccatctccatccagtggctcacggagtcgcttgctggctttcgcctccgattcttgtccatgttgattttcatgcccttctgaaacttccgggcttgcagatttcctgacaaaggcccagg

SEQ ID NO: 9424 - DNA, 332 bp, Homo sapiens
ctgcgtggagtgacgggaggagggaatcactgtgtgtgcgagagtgcttcagactcaatttccaaaataattttcacccctctaagcatgtaaatatacaaagatggatccttcatagaaattaaaaaatcaatttgagctcatttcgaatacagaacaagtatggcacagatggaagtcctgccacgtttcctttaatgatgctgactcttgtatcacacaggccagcatgaagtttcttactcagactttacaggcattttccgtaattcaatcagtcctgctcccagcacaacacaggaggtgattcaagaataatcgcgagaatcagg

SEQ ID NO: 9425 - DNA, 332 bp, Homo sapiens
  misc_feature (1)...(332): n = g, a, c or t
aaagaactanttnntaaattatgacacaaaattttattaacaaggaaatatccattaattgactactacagtaaaaactttataatgcttgtatcatgaagaaagaccttccttttccttatatattaattgaactacataggcttgctgtacattttgttattcatgttataagaattctagattccattgcttttgaaatatgtttctttttaggaactaaaagtcaacttatagtttgatttctgttttatttgtactgtgtttctgattttgtgggtttctaaataaaaagatcaaacccaccactttcaatatactgttttctattt

SEQ ID NO: 9426 - DNA, 292 bp, Homo sapiens; identical to SEQ ID NO: 29

SEQ ID NO: 9427 - DNA, 299 bp, Homo sapiens
ctgtcagcaggaagaagtcagtctccactgcctccacagtctccactgccacgctgtcagccgtgggaacaataaaaagcagccccagaatgtgaagtcagtctccactgcctccacagtctccgctgccacgctgtcagccgtgggaacaataaaaagcagccccagaatgtttgctgctgtcgtgcatggacgacaccattgcacataaaagcactagtgctccattattgcagttgggcctcctgaaaacccctagagctggagagggcaagggagaggcttcctctgatcttcag

SEQ ID NO: 9428 - DNA, 377 bp, Homo sapiens
cgtccagcgagccgccgctggatgctaagtccgatgtcaccaaccagcttgtagattttcagtggaaactgggtatggctgtgagctcagacacttgcagatctcttaagtatccttacgttgcagtgatgctaaaagtggcagatcattcaggccaagtaaagaccaagtgctttgaaatgacgattccacagtttcagaatttctacagacagttcaaggaaattgctgcagttattgaaacggtgtgaagacggattctttggttgataaattgctatcattctaaagtcatggacttcactttcggcaacaaaactaaataaggatggaacatttattgaatgaaaaatgcacttttgtttttccattttttt

SEQ ID NO: 9429 - DNA, 487 bp, Homo sapiens; identical to SEQ ID NO: 6908

SEQ ID NO: 9430 - DNA, 409 bp, Homo sapiens
ctgcaccatccccgttgccacgggccgggaaaaaaccaacgacaccactgaagacaactccagttgcctctcaacagaatgcttcaagtgtttgtgaagaaaaacctatacctgctgaacgccaccgagggtcaagtcacagacaagaagctgtgcagtcaccagtgtttcctcctgcccagaaacaaatccaccaaaaacccatacctctgccaagatttacagaagggggaaacccaactgtggatgggcccctacccagcttttcatctaattccactatttcagaacaggaagctggcgttctctgcaagccatggtatgctggagcctgtgatcgaaagtctgctgaagaggcattgcacagatcaaacaaggatggatcatttcttattcggaaaagctctgg

SEQ ID NO: 9431 - DNA, 619 bp, Homo sapiens
  misc_feature (1)...(619): n = g, a, c or t
ctgggacttgctggtaccagggtcgccacacagcaagatgttgatctcagcccgaaatttgccccttccagtgtgactaaaatccttccttgtcccgccaaagagctgaagcaaaattcccttctttatatcttcatgttcataaatgcttggagccaaggctgaagcaagcctctcataaatgtctggtttcctggaaagttccttaagcaattccacacgtttctctgaaaaaagtttctgttctgcttcttcatcaaggccatgcagacgttttgcatccgttttccgataatgaatgacatcaatgtgggttttgtggacagacttcacattactcactcttggattgactcgaataggcacagctcgatagatgcctgtaacattcactctgtccccaggctggaccttgtcaacgagatcattgtgagcaaacaggataactgtgtgtggtgtctgccctgcaggcatgtcttccggagactcctgaagcttgatcatctgcttgtcagagaaganggagcggttgtggatgagtgccatgctgtgggtggtgtggcagcgcccgcacacactgggctctgcaatgcggccgcggtccatctccacccgggtc

SEQ ID NO: 9432 - DNA, 333 bp, Homo sapiens
  misc_feature (1)...(333): n = g, a, c or t
ccaccctgactgccttctgccgctgagggcgccgctgggcctggcgcaacctgtgcactacccccacgtagcaccagcccatcaccagcatgggcagcaggaatcccgccacatggtagaggaatcgggaggtgaaccaggcatgcgtttctgcttggttctcttgggagaaggtgcaacgtggcagggagttgttgtgatggccttggctgactttggcgaanagaatctctggcaaggcaaggaggaagcccaccagccagatggtcccacaggtgatgtggatgganaggaggcggcggtggcggtaggcatggacggcgtggacaatgg

SEQ ID NO: 9433 - DNA, 476 bp, Homo sapiens
  misc_feature (1)...(476): n = g, a, c or t
ccactaggaagcttanatccacacatacgcccacttcctggctcttggtttttccttgtccttgtttggtggccctttcaccttttcttttatgtttttgctgcttgcgatgttgaatacacctcntgagttttccctcaaatgcantttggaacaggatggctctggatgggctgatggatgatttctcctcccctttgtgttctggcctttctaggagggtgaggacaaaatcttcttaatcaacaagcttnactccatctacnagaggaanganagggaggagaggagcagggttgggacaaccgaggaggctgcggcaccccctgccctgctcacagatgaacaggatgcctagggggacggcgatgggcctnacgggcccgcccagcaccctgagaccacactgttgcctcccagtgaccctgctgggacaccagnacaaggaagacagtttcgcctctngaaagccgcag

SEQ ID NO: 9434 - DNA, 348 bp, Homo sapiens; identical to SEQ ID NO: 5566

SEQ ID NO: 9435 - DNA, 469 bp, Homo sapiens
ctggggagggggcctggtccatgtacgtggcgctgccgcccccggcatctgcagatgcgttcacaaactcagggaccacttgcttgatctgtggcttcacgtatccatcaacagctttagcagtagcagactcgcagggaactggtgtgtagtatttggagtatacttcatcttttggccgatcaggaaacacgtagataaggtaattcaagtctcccaagcggtcggctagggaccgaatggagaagtctctggtggtaaaaggcatcagattccaaaacattctttcctgagaatcaaacttccaagcaatggtgatgccgccaatttctgagtcactgaatctcaggaggaaggtcccatctggcttgttaatgagtaggtcatgggcctgttgcttgtttacaaaccccaaaatggccccatcattccaatgaggcttgagatgtttttttaacacttccatcac

SEQ ID NO: 9436 - DNA, 577 bp, Homo sapiens
aaacaaggttctcgaggcaaataaggaatcttgagaatccgtgggcatgcaatgtaacaagtagcactccagatggcgccaaagaataaataggcaggtctctatgataaaagaacaaagggaaagcagtttagctcgattgttgatcaccttcaccaagcgccgtcttgctagaacatatttctgagcagtggagattttatcaacaccagcaggcatcacagactgacacaactcttttatctcatctgggggaagctgctctacattttgtagcttgctgacactctgtcgatgactgtcataatagctgaagaaatcattagcactctgtttcagcaggtagatgataatgcctaaaccaggcaggcgccagtatggaaccactggagcttgggtatcttgccgcggtccatctctattaactgtttctgaaaggctaggagtgaagagacacacagcatgctggaaggtaggggaactctgtaacatgagtgactggcaatattccattacattggcacaaatctgctgcatagccagttcaatctcatctttcttgcttactttatcacct

SEQ ID NO: 9437 - DNA, 185 bp, Homo sapiens
aaatgttccaagtgctaaatttgcaagaaaacaggcactaatttcattgtcatcatctgggaagagttagtgtccaagggaagctcagcgggaagggagggaagtgaggtggggcagggtctggcgctcaggggtctgtggcattgatgatgcttttatccgggggggcccatcctcggtaccag

SEQ ID NO: 9438 - DNA, 271 bp, Homo sapiens
  misc_feature (1)...(271): n = g, a, c or t
agggctgtgtagacggccaggttggctggggacccggagtagggctggacattgactccccactgtgcaggatccaggtcaaaggcttccaaggcccggcgctggcacagcagctcaatttcatccaccacctctgctcccccatagtatctcttgccaggataaccctccgagtacttgttgntcanacaggaccccagggcctncancgcanctcggntgcanaanttctctgaggcaatgagctccaggccacgacactggctgtcct

SEQ ID NO: 9439 - DNA, 150 bp, Homo sapiens
ccattcctgcagtgcctgtccttctcctttggcttatgctatcctcagcagcacatgcattatttgtaagcctcccttacccatttgatactacccaatcaagactctagtataaatgttctgtcccttcaagaaaccttccccagttgg

SEQ ID NO: 9440 - DNA, 210 bp, Homo sapiens
  misc_feature (1)...(210): n = g, a, c or t
gatccaacctctttgcatcttacaaagttaaacagctnanagaagtaaaataagaaggcaatgcttgtggaatgnncantgcatattggcggcgcacgcctcattacgatncgcctgcttgcttntnctgttcaatcnctgtgaccagaaaaaaaaaaaaaaangatggagggagatgattaaaggattcngtacagactaaagggcttt

SEQ ID NO: 9441 - DNA, 371 bp, Homo sapiens
ccaacatggtgaaaccctgtctccagtaaaaatacaaaaaatagctgggtgtggtggtgcatgcctataatcccagctactcaggaggctgaggcaggagaattgcttgaactcgggaagcagaggttgcagtgagccaagattgtgccactggactccagcctgggtgacagggcgagactctgtctcaaaaaaaaaaagggaaaagaaaatgtagatttccattgtccaaagtgacagcgggaggatgggtcttgagtttctcaggttggagaagcagctccacgaaggtcctgagcttgggtccactgtacatgggacagctccaaaagaggaaggtcccagcactgcatctagtagtgaggcatcag

SEQ ID NO: 9442 - DNA, 230 bp, Homo sapiens
ctgaaagtaaacagaatggattgccagttacatgtatgcctgcccagttccctttttatttgcagaagctgtgagttttgttcacaattaggttcctaggagcaaaaaacctcaaggattgatttattgttttcaactccaaggcacactgttaataaacgagcagggtgttttctctcttcctttctaatatatggagtttcgaagaataaaatatgagagcaatattt

SEQ ID NO: 9443 - DNA, 491 bp, Homo sapiens
  misc_feature (1)...(491): n = g, a, c or t
ctgagtcggaggacgagatgatccatcctgagggagtggcttccctgctgcctcctgactttcagagcagcctggagagaccagagctggagctcagcagacattcgcccagaaaaagctcctcaatttctgaagagaaaggtgactctgatgatgagaaaccaaggaaaggagaaagacgatcatctagggtcagacaggcaagagcagctaaactgtctgagggcagccaacctgctgaggaggaagaggatcaagaaacaccttccagaaacctaagggtcagagcagatcgaaatttgaaaacagaggaggaagaagaggaggaggaggaggaggaagaagatgatgaagaagaggaaggtgatgatgagggacaaaaatctagggaggcnccaatcctgaaagagtgtaaggaagaaggggaagagatacctanagtaaaaccagaggagatggtggangagagacccaaaacaagatcccaggaa

SEQ ID NO: 9444 - DNA, 530 bp, Homo sapiens
  misc_feature (1)...(530): n = g, a, c or t
aaaagatagagccacatggacagaaagatcaatattgccctttatagtggctgctgcggttgtagctccgagactatattggagggggtgaggaaggacaagggggccagcaggtgggggacagcggcagacccctcccccaccccgatgctttggtccaaacaccacctctgagggctcccttgcttgggcttctcccaagattcccatccaccctcagaggacacagctactgcctcaactgggaggattcggaaagcttcagaaggtcagaaggcattggtagagggttccgggggaggctgggactacctccccccggagtgtttgaaaagccaggctggttcaggttagatactgaggtggggatgccagagctccatgctgaggaacagggtagagggtgtgggcttctagcacccangggtctgcccccggcagtggggccgccagtagaaacgcantcgcttctggtaggtgtccangttgcgcttcaggcagaaggncacctncttgtcacaggcacacag

SEQ ID NO: 9445 - DNA, 193 bp, Homo sapiens; identical to SEQ ID NO: 166
  misc_feature (1)...(193): n = g, a, c or t

SEQ ID NO: 9446 - DNA, 126 bp, Homo sapiens
aaaaagttttattgtgaaatatttatccatgagtacatataacatagatgtccagtttttcaagttacaaaaagcagacagccctccctttttttttttttttttttttttttttttttttttttt

SEQ ID NO: 9447 - DNA, 187 bp, Homo sapiens
aaattgaatcaaagacgtaagatatctctggaatctgaaagaattccaaaaaatagcacagagaaaccatttgaaagccaaatactttacattaaattggtttcacttgtcagactcccaattccataaaactggaaaatcaatttacccaggagtcagtgtattttactgtgggggaaattacttt

SEQ ID NO: 9448 - DNA, 278 bp, Homo sapiens
aaaaacacaatacttggttctaaccctggagatttcaacagggatgggaaggtaacagccatatacttttagagctgtataggttatcctgacacctctactgaaaaaaacccttgctctaacagcaattggcttcatactcttaaatgagctacctataattttaatacaaatccatgtcctaattctctttattatttttttgagacggggtcttgctccattgcccaggctggagtgcagtggtccgatcttggctcactgcaacctgcgcgttc

SEQ ID NO: 9449 - DNA, 231 bp, Homo sapiens
cctcggccgaggtgtgctttgcatttaggacacagcccggagccgcagaaggtcagcaggagcacgtctggcaccttcagtaccaggctgggtgagagagcccgagaggggggccgggggggcagtcagggccctgcttcgctgcctgggcccttgtagatggccttctccaggccgtccaccacctccctgtattccaggaacgattggtagtgtgtgcactcaaagcag

SEQ ID NO: 9450 - DNA, 332 bp, Homo sapiens
aaaatctgtttggggaacaactcataacttctttaagtaattgatgtcaaataatgcaccctgtacttctggagaacacagcattttcaaaattgctcttttcaatctaattatatcagaaaaatatcttcaagagcttagtatttcccaatttttgatcctgatcctggtaacctttcatcaagatccaagcttatgcatagggttctcatctagacccatctgaaattctatacaaatagggagacatattaaatacaaaggtctgtgtaaattgacttaattactattttacaatgaaaaggaattttattacatctttacatcatttt

SEQ ID NO: 9451 - DNA, 184 bp, Homo sapiens
  misc_feature (1)...(184): n = g, a, c or t
aaagcaganntcacaaagcacattcccaaaccncanctccctgacaggagcttgtgacaccagtgtggcctaagaatgggggatttgacttttgaaagcagaggagggaatttcgggctggatcgcaatcaggacagtcagcatgcctgcagagcacctaggctgtgagaggatggggccaagg

SEQ ID NO: 9452 - DNA, 291 bp, Homo sapiens
ccttcacaacctacgaaactacagttcagatttgggaaagcagccgaaaaaggtgcctaaacgtcgccaggccgcccgagagctgtccattcagcgccgttctgccctcaatgtgaggctcttcctcagagacttctgctctgagttcctggagaactgttacaaccggctcatgggatcagtaaaggatcacctgcttcgggagaaagctcagcagcatgatgagacctattatatgtgggccttggctttcttcatggccttcaaccgagctgcctccttccggccagg

SEQ ID NO: 9453 - DNA, 519 bp, Homo sapiens
  misc_feature (1)...(519): n = g, a, c or t
ctgacattatgactatataatgtagttagagacaatttttatcttgcttatagtaaaggttcagcctgccaattgtaaatcattctaatttggcaggcttatttttgacattggaaagggcagaaagcgatttgccccagtagtgtaataggagttatagaccagaggctgaaacccaaactatataaaaaggaattcagtggagggggctttgtaatctccattaatttgtgttgctacttccaggatcaccaaaaattacatgtaattttacatgttaaacacattgaaacataacctatgtttataaagcataacgggcttcccttccagaagctctcctgcttgtcatgaagtgagaacaatgaaaagtcatagcagatactcagtttaactctgtgtagaacctagtagtgtttgagctgttattcanatttgaattcagactgngtgttgtttgcttatggacactgcctgtcgttctgtcactgttaaattaatgagtctataagggttttc

SEQ ID NO: 9454 - DNA, 369 bp, Homo sapiens
aaaggtgctaaaatccattccatagctttgaagtgagaacttacagcccatctgaacagtgaggtttgtacccaggcatactctgaggagggcccaaaggcccagcccatctgggagggacaggcccggaggatggagacctcgcagcatgtgcaccctgcgcagacatttacagacacgcaactcagtctttctcacttggacaacctgttgtgcaaaaacactaggaatcttgaagtgagggagctctgtccacagctcccgtaatggcagggaggagagcagagcccaatgaaccttgagtgaaattaagtgctcgaataaccacataattaaattgtgcagatcagcagtcctagtctggaattt

SEQ ID NO: 9455 - DNA, 282 bp, Homo sapiens
aaagtcatgtataatatttcttgattgggaggaaatataattttatcatcatagttaacagatcttcaagagtaaaaaaaaaaaaagccatcttagtttaaggattagtttatagtgaaattgtaatttttaagaaagctgggcgttctataaaaaccttcaagaacttattaaaaattggtattttttaattctctagaaccacatagtagaatgaataacttgctaattttattcttaaaaacctcatgtttatgttttttgatttgtgtttgtatattt

SEQ ID NO: 9456 - DNA, 258 bp, Homo sapiens
gaggagccgctgagcttgctggacgacatgaaccactgctactcccgcctgcgggaactggtacccggagtcccgagaggcactcagcttagccaggtggaaatcctacagcgcgtcatcgactacattctcgacctgcaggtagtcctggccgagccagcccctggaccccctgatggcccccaccttcccatccagacagccgagctcgctccggaacttgtcatctccaacgacaaaaggagcttttgccactga

SEQ ID NO: 9457 - DNA, 272 bp, Homo sapiens
ctgaccccggcgttcgacctcagccaggatccggacttcctgactatcgccatccgcgtgccctacgcccgggtctccgagttcgacgtctacttcgaggggtctgacttcaagttctacgccaagccatactttctcaggacttcatgagacctgtgttaaatctgcagattaacccttcctggaagaattgtagaaaatggaagtgagcaagggtcctatgatgcagataaaggaatttttaccattcgcctgcccaaagaaacccctgg

SEQ ID NO: 9458 - DNA, 325 bp, Homo sapiens
ctgctgaagactcagtctctcagagagctgtgctgatggagaagccagatgtggtagtagggaccccatctcgcatattaagccacttgcagcaagacagcctgaaacttcgtgactccctggagcttttggtggtggacgaagctgaccttcttttttcctttggctttgaagaagagctcaagagtctcctctggtaaggcagagtcacttgccccggatttaccaggcttttctcatgtcagctacttttaacgaggacgtacaagcactcaaggagctgatattacataacccggttacccttaagttacaggagtcccag

SEQ ID NO: 9459 - DNA, 235 bp, Homo sapiens
gcgacccagcccgcgagcgagatgccggtggccgtgggtccctacggacagtcccagccaagctgcttcgaccgtgtcaaaatgggcttcgtgatgggttgcgccgtgggcatggcggccggggcgctcttcggcaccttttcctgtctcaggatcggaatgcggggtcgagagctgatgggcggcattgggaaaaccatgatgcagagtggcggcacctttggcacattcatgg

SEQ ID NO: 9460 - DNA, 382 bp, Homo sapiens
  misc_feature (1)...(382): n = g, a, c or t
cctttctctanaagtcctgagactgagtactctccagaggctggaggttcgtgcggagtttgtacatgtggntgagcgcnatgtgtgangaaagncccgctggtgttgatctccatcaaggncaagttntncagcttggcatgtgcctcctgcgngtctcacaaagctgtcancagacactcggagtttggctatacgagtgtcccacatatccttgaccanggtccggatttcnnntgccttcnggatgntgtctgaagnatgatttaacaggagcttcgtaagttccatgtagtaagggctgngcattgnggtaaaagnttcttcctttcgntcatgatccctcatcttntncaacttttctacatccatncnctctgga

SEQ ID NO: 9461 - DNA, 228 bp, Homo sapiens
ccaggctggtctcaaactcttgacctcaggtgatccacccacctcagcctcccaaagtgctgggattacaagcgtgagccactgcaccgggccacagagaaagtacctctccaccctgctctccgaccagacaccttgacagggcacaccgggcactcagaagacactgatgggcaacccccagcctgctaattccccagattgcaacaggctgggcttcagtggcag

SEQ ID NO: 9462 - DNA, 312 bp, Homo sapiens
ccattttcttccaataatctgtaggaatgatcaaggggtccacaccaaccctggatccttcaggaagcacactcaccagccagtcttcctgagttggtgtgtccttcagacccatcttcataagtgtccagttgctgtccatttgcttggcagcctggagaaagtagcgcccgtcagtccacatggctgcatgctcttctgtgatgatggctgtgcccgcagagccatcgaatccagagacaaaagcccgccgacagtcacatggagcaatatactcactctgatgagcatctcccgatgggatgatgtagg

SEQ ID NO: 9463 - DNA, 397 bp, Homo sapiens
  misc_feature (1)...(397): n = g, a, c or t
cctggtcacaatagggaagcgggggtggctcctcccctagcctgcaggaagcccttggtagcccacttatccaccttctcctgggtgtgtggctcancagccaagtccttgtgcactgggttgggtcccagcatgagcctggtggcctggcgggccctggcaccatggagagcagcctgctgccagtgatggcctggatctccaagacggcctccagcactgtcatgcccttgaccagctagtgctggtacaggacctgggtaacaggcatgtccttgggcgtcactggctcaggggcagaggacgaggttgaggaggaagctggatacccctgtccatggtgggctggggctggaagggtggctcantggcctcgaagtgccgggaggactcccag

SEQ ID NO: 9464 - DNA, 275 bp, Homo sapiens
ccttcttggagcccctgggcaccccgggctactgtggggctgtgggcctgttacccccaggcgcagcagctccctccggctgggcccaggctccactcagtgacacggctcaagtctacatggagctgcagggcctggtggacccgcagatccagctacctctgttagccgcccgaaggtacaagttgcagaagcagcttgacagcctcacagccaggaccccatcagaaggggaggcagggactcagaggcaacaaaagctttcttccctccag

SEQ ID NO: 9465 - DNA, 282 bp, Homo sapiens
ccaggcggtacatattctggtgcttcttagcagccttctggaagagatctcgcaggtctgctttctgcggggcagaagtaaaggggtgaagagtagccctggccctccaggcagacaggaggcagagggggcacctcacccgacgactgtgacccccacatgggcagaggacacttactgtgtgggacccctccatcatggcctgcacaaaggctgtggactcgctggtacaggaacgcacagtctcagtccgcccctcccggaacattctggtcattgagg

SEQ ID NO: 9466 - DNA, 287 bp, Homo sapiens
aaaagacctgatggggagatgaacattgcatctggctgtccccgctttgtggctcattctgttttggagaatgccaagaacgcctacattaaagatgacactctgttcttgaaagtggccgtggacttaactgacctggaggatctctagtcactgttatggggtgataagaggacttcttggggccagaactgtggaggagagcacatttgattatcatattgacctggatttagactcaaagcacatttgtatttgcctttttccttaacgtttgaagtcagttt

SEQ ID NO: 9467 - DNA, 420 bp, Homo sapiens
  misc_feature (1)...(420): n = g, a, c or t
ccatgatnccaaacaaccatatacactagttgtattctttaataagcgagtatataatattcctgtgcganttattgaancaacaaaacaatatgccttgggcagaaagaaaaatggngaagagtactttggaagtgttgctgaaatcatcaggaatcatcaacatagtccttnggttcttattgacagtcanaataacacaaaagannccaccanactgaantatgccnntaaagnttcataaagggggaaaaaaaagntcaataccattgcttcagnnactttcccaaagtttntcctttngagaaaaagtnccaaaacttcatattttggattatgaatcatccagtaatnaaatggnagatggagtnagctattgaagtggncatanatttctttttaanaagctcatgnggactt

SEQ ID NO: 9468 - DNA, 308 bp, Homo sapiens
  misc_feature (1)...(308): n = g, a, c or t
ccatttaccagactccgacacaatgggccaccaccagtgtgacagcaggacatcctaatatatggatcttgatttttaagtttcagtatctgaacttcgtaaattagtaacttttagctgggaaagtatagcatgaaaccagaggttctcagaatgactgtaagatagcttacatttcctctttttgcctttatctccccaactaaaatacaatggggaagaagtctgcctatgatctttgaatgagctttttaaggaagaaatattatatattgnttgttaaagtttattgaaataaagaatcattt

SEQ ID NO: 9469 - DNA, 358 bp, Homo sapiens
tcgaattctggtgaaaaaggaagaattgacccttgaaggaatcaaacagttttatattaatgttgagagagaggtaactgtctgattgttagacattattttaccttcttgtataagcactgtgctaaaattgcagacactaggaccatgtcttggtttttgcaataatgctagcagagtacacacaagaagaaaagtaacagcactagattgtaaagactggggtggacctctttcttaatgtccaatgtcctttgtcttaagatttggtgcaatatctcattagacctaacagaatgaagttaatttttataatttctacgttttgagactgggttatgagactggctaagactgg

SEQ ID NO: 9470 - DNA, 172 bp, Homo sapiens
  misc_feature (1)...(172): n = g, a, c or t
cctgtgggcctagctacttgggaggctaaggtgggaggatcatctgatcctgggaggtcgaggctgcagngagctgtgatcatgcctggacaacagagtgagaccgtcacttncgctctttctcggccgccattttggctagggcaggttcggggactcggtccgaggcgct

SEQ ID NO: 9471 - DNA, 356 bp, Homo sapiens
ctgagcacaaataattttccagcgccagcacaggtgtgaaaggctcacagacagacacacgcaacatgacacacccatcacttcccaagtccccagcttccccaggaacacagggcttgggctccaggccctgggcagacgaacccacagacagggctcctggttgtcacagcttgttccttggagctctcaggctgccaagggcttcaacatggtggtggaccagggagagtccacggtatagcgtctagctgatttctgccagaggatggggagggaaagagcagacacacccttggttcccgaccctgaatgagggccagcctcagtcccccagcagaagagcaccaggtcgg

SEQ ID NO: 9472 - DNA, 373 bp, Homo sapiens; identical to SEQ ID NO: 167
  misc_feature (1)...(373): n = g, a, c or t

SEQ ID NO: 9473 - DNA, 374 bp, Homo sapiens; identical to SEQ ID NO: 5632

SEQ ID NO: 9474 - DNA, 172 bp, Homo sapiens
ctggccttcctgagacaggctccattcctgttccatttgccttcccggcagccttccctttagtgggtataggttttgacgttctgagttactttgtatcaaagagctaattaaaaatggtccttcaaaaacataaagaaaaacagcttgaaaaatgtacatttctattttt

SEQ ID NO: 9475 - DNA, 387 bp, Homo sapiens
ccttttttaagtgacctgtaactcatatcagtgaaaaagaacatgctataaaaagattccacaaagtgagagcattaagctcaaaggtcctgaggtaggtgtgtttgaggagctggtgtgtagctgctgtataagaagtcaacctccttattttcaggtacatttattattattttaaccccaagcagaattgcctagctgggtccctcacctttacacaatagtcataggatttgactgttatcaaaaagtaaatccactctcagaggccatagatttcctattactgaggttcttcaaaagaatatgtaatcaatttatatagtaattcctaaaaatgagattctaaaatatagtagcatgcagatgaagcatagctaatgcttt

SEQ ID NO: 9476 - DNA, 278 bp, Homo sapiens
ccaccagtgtgacagcaggacatcctaatatatggatcttgatttttaagtttcagtatctgaacttcgtaaattagtaacttttagctgggaaagtatagcatgaaaccagaggttctcagaatgactgtaagatagcttacatttcctctttttgcctttatctccccaactaaaatacaatggggaagaagtctgcctatgatctttgaatgagctttttaaggaagaaatattatatattgtttgttaaagtttattgaaataaagaatcattt

SEQ ID NO: 9477 - DNA, 543 bp, Homo sapiens
  misc_feature (1)...(543): n = g, a, c or t
ctctgcactatgtcgggtggcctcctgaaggcgctgcgcagcgactcctgcgtggagctgagccagtaccgggaccagcacttccggggtgacaatgaagaacaagaaaaattactgaagaaaagctgtacgttatatgttggaaatctttctttttacacaactgaagaacaaatctatgaactcttcagcaaaagtggtgacataaagaaaatcattatgggtctggataaaatgaagaaaacagcatgtggattctgttttgtggaatattactcacgcgcagatgcggaaaacgccatgcggtacataaatgggacgcgtctggatgaccgaatcattcgcacagactgggacgcaggctttaaggagggcaggcaatacggccgtgggcgatctgggggccaggttcgggatgagtatcggcaggactacnatgctgggagaggaggctatggaaaactggcacagaaccagtgagtggngagagctctgtcagtgacaaacactcctttggcctgttgaatttgctgaagaacatca

SEQ ID NO: 9478 - DNA, 452 bp, Homo sapiens
ctgaaaagttccagcatattttgcgagtactcaacaccaacatcgatgggcggcggaaaatagcctttgccatcactgccattaagggtgtgggccgaagatatgctcatgtggtgttgaggaaagcagacattgacctcaccaagagggcgggagaactcactgaggatgaggtggaacgtgtgatcaccattatgcagaatccacgccagtacaagatcccagactggttcttgaacagacagaaggatgtaaaggatggaaaatacagccaggtcctagccaatggtctggacaacaagctccgtgaagacctggagcgactgaagaagattcgggcccatagagggctgcgtcacttctggggccttcgtgtccgaggccagcacaccaagaccactggccgccgtggccgcaccgtgggtgtgtccaagaagaaataagtctgtagg

SEQ ID NO: 9479 - DNA, 208 bp, Homo sapiens
cctggagcgtttgctgtgccaggaggcggcagctcttctgggcagagcctgtccccgccttccctcactcttcctcatcctgcttctcttttcctcgcagatgataaaaggaatctggcattctacacctggaccatttgattgttttattttggaattggtgtatatcatgaagccttgctgaactaagttttgtgtgtatatattt

SEQ ID NO: 9480 - DNA, 254 bp, Homo sapiens
gacattattacaccttattaaaacttcacccagatgtccagacaaagctccatctatgtattcttctgtatttgcaagctgcatgttcatgtagccatctacagataccagatagcccttgtactccattccccacttaagtttcaccatcactggctttcctgttagtccattgaggaaaggtttgggattgaggggtaaactcatcgtaaccacggccgaatgttgcaggctactctctgccgaccaggccg

SEQ ID NO: 9481 - DNA, 203 bp, Homo sapiens
  misc_feature (1)...(203): n = g, a, c or t
ctggaccccancacctggtgctcccgtgctgagcccccagaccagtcctttcggaccggctctcccggggatgccccggagaggccgccgctttgcgactttagtgaggggctttcagccccaatggacttctaccgctttaccgtcgagagtccaagcactgttacatcaagtggcggccaccatgaccctgcagggcttgg

SEQ ID NO: 9482 - DNA, 209 bp, Homo sapiens
  misc_feature (1)...(209): n = g, a, c or t
gcttcgtggaggttggccgggtggcctatgtctcctttggacctcatgccggaaaattggtcgcgattgtagatgttattgatcagaacagggctttggtcgatggaccttgcactcaagtgaggagacaggccatgcctttcaagtgcatgcagctcactgatttcatcctcaagtttccgcacagtgcccaccagaagtatntncga

SEQ ID NO: 9483 - DNA, 334 bp, Homo sapiens
cctgcttcacttgcagataagtttattataattctccagaaatgtgcaggatgtgcattagcaaattgcactgtacttttcactccagcctgggtgacagagcaagactcccgtctcgggggcttaaaaaaaaaaaaatgctgtatctaaatgaatctgtgtaattgggcccagatgtgggtttgcccagtattagtagacaaggtctttgttcagacgattaggtgcctaactggcaaatgccttagtttcttaaaacgtattttctgatgtggctttacatttcaaaagtgaacttgattcaacctgagaaaactgattaaaaaattagttt

SEQ ID NO: 9484 - DNA, 243 bp, Homo sapiens
ccaccaagtaagaatggttggtgacaagacagaaggctaaaacaggaaggtaatcttgtgcacctgacaaatagaaagaataaaggatcaaaattgaaggcaggctataagagtatcaagaaattcttaaaaaccaaaaagtgatttggaagcacaaaacttacagttaatgctacccaatgtcatgatgggccaagaacattgtggcttcctaagttagaaaatgccatatgccaaaatttt

SEQ ID NO: 9485 - DNA, 466 bp, Homo sapiens; identical to SEQ ID NO: 169
  misc_feature (1)...(466): n = g, a, c or t

SEQ ID NO: 9486 - DNA, 423 bp, Homo sapiens
  misc_feature (1)...(423): n = g, a, c or t
aaaggtgtgtgtattctgtntgcatctccctgtnactgtgacacacctagatgtgtgttacttcnattaaaattctcaaatttaattttgatttgcttcagnagggacnatcgagcggccgnccgggcaggtccaatgtagctgatgtcgtgagcaaaggccagagggtcaaagtcaaagtgctgtccttcactgggaccaagaccancctgagcatgaangatgtggatcangagactgganaagatctaaacccaaatagacggcgaaatnttgncggggagaccaatgaggagacctcaatgcggaatcctgatagacccactcacttgtcccttgtnagngctcctgaagtngaggacgactcantggaacgcangcgcctcacccgaatctntgacccatanaagtgggagatnaaac

SEQ ID NO: 9487 - DNA, 429 bp, Homo sapiens; identical to SEQ ID NO: 170

SEQ ID NO: 9488 - DNA, 553 bp, Homo sapiens; identical to SEQ ID NO: 171
  misc_feature (1)...(553): n = g, a, c or t

SEQ ID NO: 9489 - DNA, 319 bp, Homo sapiens
  misc_feature (1)...(319): n = g, a, c or t
aaagtcaatctaccattaaatatacttatcttaaaattcattttgttagaaaatanaattcactttgagatctacttcttcccatattggtttattattccaataaaattcctatattcttgaatatgttttttctttctagttctgaggtatttaatttattactgaactctcttccaaatgatacacatacttgaaaaataatgagaaagaacatcttctagttanaaagattctgntnctagtaacttcaacaacagttatggaaaagaatactggaagttatccagtnaaattataagatgaaaattactatttt

SEQ ID NO: 9490 - DNA, 308 bp, Homo sapiens; identical to SEQ ID NO: 4688

SEQ ID NO: 9491 - DNA, 274 bp, Homo sapiens
aaacaagacacccaaatcagcagcaaaggtacctggggtagtcactgagattttgaacactgggaatgggagggggaaagtccaaaaagtagaagttgggaagaaaagggaaggattgagggagacgctaggctctggaggacagagctgggccgcaggaggtggaagtaagccagtatggggggtacccctcctgactgctgttgcccgtattcccccagaccccagagagccccacggtttgttctgcagtccattccctattccccaaagg

SEQ ID NO: 9492 - DNA, 83 bp, Homo sapiens; identical to SEQ ID NO: 168
  misc_feature (1)...(83): n = g, a, c or t

SEQ ID NO: 9493 - DNA, 320 bp, Homo sapiens
aaaagaattaaccattggaatgaatggcatggaaccaactaatcagaatggaagacagccctggcactggagtaggatcatagagaacttctgcttgcttggccttcagcttttaggtttttggatcatggagagtttaaggagtcctgggagagggccagggagcctgcagttgtagcagggctcagggctgtggctttttaccaaatggtacagaaatagacaaattataacccccacatggctgaatcagttcatactgaccagcatgacccaaacccttttatcctaaaggatctccccacgagagtgttttggac

SEQ ID NO: 9494 - DNA, 260 bp, Homo sapiens
  misc_feature (1)...(260): n = g, a, c or t
ctgtggcccccanggctaccctacacaacgccctccccaggcccccctaagctgctctcccttggaacctgcacagctctctgaaatggggcattttgttgggaccagtgacccctggcatggggaccacaccctggagcccggtgctggggacctcctgggcaccctgtccttcactcctttgccccagggacccaggctcatgctctgaactctggctgagaggatgctgctcaggagccagcacaggacaccaccac

SEQ ID NO: 9495 - DNA, 481 bp, Homo sapiens; identical to SEQ ID NO: 173
  misc_feature (1)...(481): n = g, a, c or t

SEQ ID NO: 9496 - DNA, 110 bp, Homo sapiens; identical to SEQ ID NO: 174
  misc_feature (1)...(110): n = g, a, c or t

SEQ ID NO: 9497 - DNA, 430 bp, Homo sapiens
cctagagagtcatatgtctcagttcagaaatctatcgaagtggcagagctggaattcaaacacaagcagccgttctctgctattccaccctggtgtccaagcaacatggtagggcagaaggaagaggatcttacaaagagtaagggaaagggagaggggcagaggctgcttctcagagccaccaaaggacaaaataagacaggtgtgagcccagtggaggaggcacggggcagagaccagccactgttgctggcacgctggtgcacgtagcactgtggcagatggacctggagaggaagcaggagggacagcacaatggagccaagaaaggacttagcatggccgggcgcggtggttcatgcctgtaatcccagcattttgggaggccaaggtgggcagatcacctgaggtcaggagtttgagaccagcc

SEQ ID NO: 9498 - DNA, 403 bp, Homo sapiens
  misc_feature (1)...(403): n = g, a, c or t
aaaaaatggtatttcagtatacagtcatccctcgtcatcagcggtgtgtggggcggcgggggcggttccagaacccttcccagatactagaatctgcagatggttaagtcctgcagttggccctgtggaatctgtggattagacaagttggccctccctatctgcaggttccacatccttgaatactctgttttccatctgaagttggttgaagccatggatatggagggctgactgtcgttggttttgttttttttttttttgatagacttcattttttttttttatggnaatattaggtgcatagcaaaatanagnggaatccaagagagttcccatatacttccagtcccctnacacacaagcctccccaactaccagcagnctgcaccagagtggtaca

SEQ ID NO: 9499 - DNA, 530 bp, Homo sapiens
ctggttccgccctatgcggactctgcccatggaacccggccctggaggctcagagggacggggaccagaggaccagggtccccccttggtgtggactgagattgcccccatccggccggaatccagtgattcaggactgggcgaaggagactctaagaggaggcgcgtgtccccctatccttccagtggtgacagctcctcccctgctggggccccttctccttttgataaggaagctggaggacagttttataactattttcccaactgagcagatgacatgatgaaaggaacagaaacagtgttattaggttggaggacaccgactaatttgggaaacggatgaaggactgagaaggcccccgctccctctggcccttctctgtttagtagttggttggggaagtggggctcaagaaggattttggggttcaccagatgcttcctggcccacgatgaaacctgagaggggtgtccccttgccccatcctctgccctaactacagtcgtttacctggtgctgcgtcttg

SEQ ID NO: 9500 - DNA, 146 bp, Homo sapiens; identical to SEQ ID NO: 338
  misc_feature (1)...(146): n = g, a, c or t

SEQ ID NO: 9501 - DNA, 304 bp, Homo sapiens
cctcaggaaacttacagtcatgacagaaggggaggcaggcatgtcccacatggtggagcaggaggaagagctcacctacagcaaattatttaagaccgagcatttgtctctgttctgttccctctctggacgcaccctcctgcctccaccctgacttgccgtctcctgagcactgaagatatttttggcttgtccgatgtgactccacagacagcagaaacgcttgcttgatcagggcagcatcagggcaccacacatgcctgggcttgcacaacacagtgggagcactgccactcagcagcag

SEQ ID NO: 9502 - DNA, 312 bp, Homo sapiens
aaaaatcctatattaatccttttataagtgaacagtcacttaaaaatctcagctttcataattgggttgattaagtaacttatatctgctgtataataaacatagcgatcacagactatcctttttttccatattttataactctgaaactgagctctttactgttgattatccaaatcttttgccttttttctattagcaccctgcccatttcactactctaatcagccaatcaagagataaaatgagtctgggcttggtggctcatgcctgtaatctcagtactttgggaaaccgaggcaagtggatcag

SEQ ID NO: 9503 - DNA, 421 bp, Homo sapiens; identical to SEQ ID NO: 172
  misc_feature (1)...(421): n = g, a, c or t

SEQ ID NO: 9504 - DNA, 427 bp, Homo sapiens
  misc_feature (1)...(427): n = g, a, c or t
ccttgcctcanatccaaggtcactcngaagaggccatgnntaccctcaatgacactcatggaggaaatgctgaganaagcattcagatgcatnacacaaggnnagactgccnaaaatcttgnnncttgctctcctnatttngntatttgtnttatttttagganttttgagagcaaaatgacaacacccagaaattnagtaaatgggactttcccggcngagccaatgaaaggccctattgctatgcnatctggtccaaaaccactcttcnngaggatgtcttcactggtgggccccacgcaaagcttcttcatgagggaatctaanactttgggggctgtccagattatgaatgggctcttccacattgccctgnggggtcttctgatgatcccagcagggatctatgcacccatctgngngactg

SEQ ID NO: 9505 - DNA, 350 bp, Homo sapiens
  misc_feature (1)...(350): n = g, a, c or t
ctgggaacaactttcttnaaactacctggnggtgaacttaacccaggagaagatnaagttgaaggactaaaacgcttaatgacaganatactgggtcgtnagganggagttttgcaagactgggtcattgacnattgcattggtaactggtggagaccaaattttgaacctcctcagtatccatatattcctgcacatattacaaagcctaaggaacataanaagttgtttctggntcagcttcaagaaaaagccttgtttgcagtccctaaaaattacaagctggtagctgcaccattgttngaattgtatgacaatgcaccaggatatggacccatcatttctagtct

SEQ ID NO: 9506 - DNA, 343 bp, Homo sapiens
ctgtcttccacggtacctgaactgggtctgattttttgaaacattttggaaaagagattgcgtttggaatgtttacatttcatgtgacaacatgaaaacaataaactgaaatgtcacctgaatgtgtagtaggagtctccctgtgtttaagtaactggtgtatcaaattgaatacttaagactgacactgttaaagtacccttgactgcaatagaatttgatggaagatctcagggaagtggaacaaaatcttgtatgaaaaataaggaagtagaaagaaggtctaagtctgaatttcatcccaggggttttcccttttctgaaatgttaagggctcctttgg

SEQ ID NO: 9507 - DNA, 237 bp, Homo sapiens
ccttggcggggctggcacctctgtgtcatgggagactctgtcccaggctctctccctgctgctgggctttgccggccgtctctgctgctcttggcttatggaagcagcaccatcttcacagggcgttctccccacgtgctgtctgtgcccagattcccccttttcatgaggacagcagtcatattggatcagaggcttgcgctactccagggtgacctcatctgaacttgattgcag

SEQ ID NO: 9508 - DNA, 432 bp, Homo sapiens
aaatgtatatggttaaacagccaatttagggaagaggaaataacactatatccagacaagcatgggtgtgtccgggacctgttagaagaatgtaaaaaggccgtggagcttggggagaaagcatcagggaaacttaggctgctagaaattgtaagctacaaaatcattggtgttcatcaagaagatgaactattagaatgtttatctcctgcaacgagccggacgtttcgaatagaggaaatccctttggaccaggtggacatagacaaagagaatgagatgcttgtcacagtggcgcatttccacaaaggggtcttcggaacgttcggaatcccgtttttgctgaggatacaccagggcgagcattttcgagaagtgatgaagcgaatccagagcctgctggacatccaggagaaggagtttgagaagttt

SEQ ID NO: 9509 - DNA, 552 bp, Homo sapiens
  misc_feature (1)...(552): n = g, a, c or t
cctggtctgagcaagggcagccccctgtcccanacacaggcacccccaatctcactttggacagagccaacgtggggggatcctcccgggcctgggcctgtcaagtctgcctgcgggaccctgccattgtgctcaaatcacaaccattttgtgcttccaacatttagggtgcttgtgcantgagtggagctgggggcctgccccctaacatggaccttggacatccctgaaagagtgggcagagaatccaactctcatgaagcacaactcggggtgtctcatggatgttgggctcagggctcctgaaggacttcaagtttagagagtcaatgacacttgccaggacagcaganctggccccgccgtgaggtagctgacccatcagaaacagcnnaaaatgggcatgatgatgagcacctntcgcagggccataagatcacacttcgtgcaagaacacgccttgcagctacagtgcagtcaccccaggtggggcatccccggcccgggggtgggagctnaaggggacagagtcttacgtgtttctatcgcttg

SEQ ID NO: 9510 - DNA, 252 bp, Homo sapiens
cggggtgatcatggacgcttgacaacctgcgggcaggcgccgggaggccgagccagcgactaagaggaccgagaggtggcgtggacagatttcaaggccagagaatggcaggggaacagaaaccctcaagtaatctcctggagcagtttattttactagccaaaggtaccagtggctcagccctcactgctctcataagccaggtcttagaggctcccggagtgtatgtctttggagaacttctggagctgg

SEQ ID NO: 9511 - DNA, 438 bp, Homo sapiens
  misc_feature (1)...(438): n = g, a, c or t
ccacctccccatatcctgagactgacagngttttttttgagccttcccatctgacatctgctgctgatgaaggtgctgttcaagtcagtagaagaaccatttcttcgaattccttctcaccagaggtatttgtgctgcctgttgatgtagaaaaggaaaatgcccacttttatgttgcagatatgattatatcagcaatggagaaaatgaagtgtaacattctgagtcaacagcagacagagagctggagtaaagaagtcagtgggttacttgggagtgatcagcctgactctgaaatgacttttgataccaacataaagcaagagtctgggtcttctacttcttcatacagtggctatgaaggttgtgctgtgttacaggtcagcccagtgactgaaacacgtacttaccantgatgnngcctaatgagtgagctaa

SEQ ID NO: 9512 - DNA, 395 bp, Homo sapiens; identical to SEQ ID NO: 339
  misc_feature (1)...(395): n = g, a, c or t

SEQ ID NO: 9513 - DNA, 372 bp, Homo sapiens; identical to SEQ ID NO: 175

SEQ ID NO: 9514 - DNA, 292 bp, Homo sapiens
  misc_feature (1)...(292): n = g, a, c or t
ctgaccatgaaggacagcaaccagttccacgccacctgcctcgacaccttcccgcccatctcttacctcaatgccatctcctggcgcatcatccacctggtgcaccgcttcaacgcccaccacggggacaccaaggtggcgtacacctttgacgcgggccccaatgccgngatcctcaccctggacgacactgtggctgagtttgnggctgctgtgtggcacggctttcccccaggctcgaatggatacacgtttctgaaggggctgcaggtgangccggcccctctctcag

SEQ ID NO: 9515 - DNA, 373 bp, Homo sapiens; identical to SEQ ID NO: 176
  misc_feature (1)...(373): n = g, a, c or t

SEQ ID NO: 9516 - DNA, 247 bp, Homo sapiens
ctgccatgttcacatatcggtccctctcccttcagggtccacagagggaccctcagcggctttctcttctctgtcccagctccccagcagccacagcattcgccagggtgacctcggtcagacggcgccactcacccatcacgagactagaaccaccgcactcccaagacagccttgttccttggagctcaggatcagaagggcaacaaggacacacacatgcacttaccaaggtggctgtgcctgg

SEQ ID NO: 9517 - DNA, 146 bp, Homo sapiens
  misc_feature (1)...(146): n = g, a, c or t
ttcagggatcttgaactgaanaaaatangtctgggaaagaacagtnctggctcaaatgtttcatgttcattaatctatgaaacctttattaaaccagtactgngtatcaggcacatgatttcctaaaggagaaattttaacatttt

SEQ ID NO: 9518 - DNA, 154 bp, Homo sapiens
ccttgttcaaaatccaagctgagggtggcactaattccaattagaatggcaagagtcatgccaaggaccagcaccctaagagtgtttctccccgcataccaaagcatcactgcaatgtgcagaagagctgataacggtaggattttgtaaccag

SEQ ID NO: 9519 - DNA, 329 bp, Homo sapiens
ccatggagaaggaggaaaaagagagtcccttctccagtgaagaggaagaagaagatgtgcctttggactcagatgtggaacaggccctgcagacctttgccaagacctcaggcaccatgaataactacccaacatggcgtcggactctgctgcgccgtgcgaaggaggaggagatgaagaggttctgcaaggcccagaccatccaacggcgactaaatgagattgaggctgccttgagggagctagaggccgagggcgtgaagctggagctggccttgaggcgccagagcagttccccagaacagcaaaagaaactatgggtaggacag

SEQ ID NO: 9520 - DNA, 126 bp, Homo sapiens
ccacttctgccacccccacccctttaagacactgaaacatgccggacagcagattcacaagtgaagagcaggaaacagggtttgaggatagtggttaaccatggctgcattcttctgggagccttt

SEQ ID NO: 9521 - DNA, 215 bp, Homo sapiens
ccagctctgtgggaactatacagggagctgggcctatttcagggcccagcactggggctgaggaaccatttgggaagaaaactaagaaggagaaaaaagaaaaaggcaaagagaacaacaaactggaaggtactttggggagatgatatcagttgccccagtgactcacctactaatgacagttagacctggtactaactgacagacacacacag

SEQ ID NO: 9522 - DNA, 122 bp, Homo sapiens
  misc_feature (1)...(122): n = g, a, c or t
gatattgttaggatctactagcaaatgatttggtaacctgacatctttgtattcatgtccaaaaaaattcttttataagaacaaaaatgntactcttagcctcattcactgnagnattactg

SEQ ID NO: 9523 - DNA, 286 bp, Homo sapiens
cctagaaaaatgcctggcacagaagcatttactaaatatttgttaaatggatgaataaactatgtgaccagaattccttaatactgggtccgagactagaaagtgggagttactggtttggttttggcacttgtttagtcagcttgtgctgccataacaaaacaccacagatggattggttaacaacagacatttctttctcacaattctggaccctggaaatctgaggttagggaaccagcagattcagttcctggtgagggccctcttcctgcctggcagacag

SEQ ID NO: 9524 - DNA, 518 bp, Homo sapiens
  misc_feature (1)...(518): n = g, a, c or t
aaaaataaagtctccctacttaaaatccagtagatatcatggcactaatgctaacacccctttccccaaattaataaaacaaaaataaaaaaaagaaaaagagaaaagagaaaagcaaggtggttagccctccctcctgaaaaaaaccttacaatggtagtgctggaaaaggaagttgcccttgattaaaaaggtaacaaaattcccacattgtacaaatcggttccagtatagcaagaggtgagggctagggcagaggagcaaactatgtacaaggacccattgaaaacgcagtagtaggactttggcactatgaacaattcccaccggtcctctgggaggtgcgtctgagagtcgctggacttcccgcaccctccaggcacacgcgagctaagtagttccacttggagtcactggcaagggtggcccatggctggggagagaccatctcttctttcttcaaagacggagcgtcccgttgatcagcacagcagtnctaacagacttccctgtctagg

SEQ ID NO: 9525 - DNA, 226 bp, Homo sapiens
ccccctagaggtgtccctgtgcctgtctgctgtccaaggcaagtgccacacacagccttggagttaccccagtgtgtgtctttcctctctgaggctgtcggtgctgatgacaacactgggacccataggtcccagcaactccctgagtgacacatcccctcctgtgcagtgtggcagaggagtgctgagttggcttggacctgtccaacctcgtctggcctcattt

SEQ ID NO: 9526 - DNA, 274 bp, Homo sapiens
ctgattgccaggtgaacatcaccatcttactcctctgaataactagacacaaattacatagcaagttcgagtttctgcccacccaagacacagccagtaatcagtcacaaacacagacacagccaactccaggggctccagctttctgcccatcttctctcagcagttcctcccatctgctaagatgcgccttcctggtggctctctctcaaggtgggtcaaggctgaacaagacagaaaagcacagtctaggtccaccatcacctcccactgg

SEQ ID NO: 9527 - DNA, 376 bp, Homo sapiens
ccaaaggcagctctggcatgctcaaaccctccaacctgtagccgcttcttgaagaggtccagcggatatgtcagggtcttgctgatgacaccagctccactgccacaaagcaggttttggaggttctcatttttctttccttcggctggtatggcccacttgtacaggtgcttcaaggagctgtagcaagagaactgcagcccggcgtaggggaagatggcgatcaaggtgggagccaagcctttgtagaaaacctgggggccttcgctcctatacatggtccccacggcgtggcgcagcgtattatagaccttgggctcaccctgagctgcaaagcgggtgcgcagaacatccacggggtgcacagtgagggtgg

SEQ ID NO: 9528 - DNA, 220 bp, Homo sapiens
ctgggggatgttactgccttgtgccagttccccaagctcgaggaactcagcctggagggcaaccccttcctgacggtcaatgacaacctgaaagtctcctttctcctgcccacgctccgtaaggtcaatggcaaggatgcgtcctcaacttactctcaggtggagaacctgaatcgggagctgaccagcagggtcacagctcaccgggagaagttcatgg

SEQ ID NO: 9529 - DNA, 425 bp, Homo sapiens
  misc_feature (1)...(425): n = g, a, c or t
gaggtagggntngcaatgagctccacccttcagccatgtcctgcaaccttccccgggcccatagtgagggtgccaccttactcccagcctccangggctctgcctgctcctgccctgtcccccgcatcctatgaggcatgggcgtgggtgggcacagcatactgtgcgtgtgngtgtccgtcacaccttgctcgggacggaaagattcccacacaggaataaggacccgtggccctcatgggggaaggacagaggcactacaggtcacctcatcccctctcctgcctccatggcacacgtcaccctccccaggccacttccaagtcactcagagttgtgggacagagngaagctctctgcatggcgtttccttggctatggnttgcagaggctgcaaactccaatgagctacagtttgggggcag

SEQ ID NO: 9530 - DNA, 450 bp, Homo sapiens
  misc_feature (1)...(450): n = g, a, c or t
ccttgcctcanatccaangtnactcggaagaggccntgtctaccctcaatgacactcatggaggaaatgctgagagaagcattcanatgcatgacacaaggtaagactgccaaaaatcttgnncttgctctnctcattntgtnatttgttntatnnttaggagttttgagagcaaaatgacaacacccanaaattcanntaaatgggactttcccggcngagccaatgaaaggccctattgctatgcaatctggtccaaaaccactcttcaggaggatgtcttcactggtgggccccacgcaaagcttcttcatgagggaatctaagactttgggggctgtccanattatnaatggnctcttccacattgccctggggggtcttctgatgatcccancngggatctatgcacccatctgtgtgactgngtnntaccctntctggggaggc

SEQ ID NO: 9531 - DNA, 242 bp, Homo sapiens
  misc_feature (1)...(242): n = g, a, c or t
ccagcaatctgcctgagcagttcgactgtgccatcaacanccgcattgacgtgatggtccacttcgacctgccgcagcaggaggagcgggagcgcctggtgagactgcattttgacaactgtgttcttaagccggccacagaaggaaaacggcgcctgaagctggcccagtttgactacgggaggaagtgctcggaggtcgctcggctgacggagggcatgtcgggccgggagatcgctcag

SEQ ID NO: 9532 - DNA, 271 bp, Homo sapiens
aaagtttgctgtgtttgtaaccagtgtgtgttgagaaggaccaacaccaaaccaccctggggaagggggacagggaaacatttaacacagacgatgatcaggatttgccccaaaccaccccaagagagaggactgagtggaacaaaaaagtgacccccagaacctctcttagtgtgagggtgggtagaatgagaactgacacctgggagctgtggggagcagagcggctttggggaagagtggagtgactagacacctaatgccctggcag

SEQ ID NO: 9533 - DNA, 373 bp, Homo sapiens; identical to SEQ ID NO: 177

SEQ ID NO: 9534 - DNA, 409 bp, Homo sapiens
tcgggagggaggaaggtggcaagatggtgttggaaagcactatggtgtgtgtggacaacagtgagtatatgcggaatggagacttcttacccaccaggctgcaggcccagcaggatgctgtcaacatagtttgtcattcaaagacccgcagcaaccctgagaacaacgtgggccttatcacactggctaatgactgtgaagtgctgaccacactcaccccagacactggccgtatcctgtccaagctacatactgtccaacccaagggcaagatcaccttctgcacgggcatccgcgtggcccatctggctctgaagcaccgacaaggcaagaatcacaagatgcgcatcattgcctttgtgggaagcccagtggaggacaatgagaaggatgtgagtccaagtggcag

SEQ ID NO: 9535 - DNA, 396 bp, Homo sapiens
ctgctgggggaagcagcttgttcaatgggagaactgggctgtgaagtctgaccagactgggctcaaaccccctctctgccacattctagcaaggcgtttaggctttgagcctcagtgttgccacctgtgaaacgggtgacactatgtcacagactgcagggtgaggttgtggaaacgcccagcatggaccgggacacaggcggcgctccatgaagcttccttggctccctctctaggtggtggtcagcgtccctcagaggatcatggcccgtcacctccaccccatccagacaagcttccaggaggctacagcctccaaagtgattgttgccgtgggagacagaagctctaacctgagaggcgagtgcacccccacccagagggaagtcatccagg

SEQ ID NO: 9536 - DNA, 155 bp, Homo sapiens
aaatgttcatttaacttagttttgtttagctagttaaaacacactagcatttgtctagtttcctcatctggatgaggaaacctgctgtgatggcagtgataaaatttttccttttaggaattttgcaaataaaccactgcaattatagacacttt

SEQ ID NO: 9537 - DNA, 613 bp, Homo sapiens
ctgaggcttggaaacgtttcttgtgttgccctgaaaaatctttgagacctcagggaggctctgtctctcttaaaaggtggagaaagatgccattctctccctaaggtctggtggagtctccccatcttgcatacccttctgcaagccatctatctctgctcactctccaattgacccgcctgggaacaagggatgaggaggagttgggggctggggggaatcctgccagttggtgaagccctgtggcaggaaggtatatgtggacatagagtatacctgactctctttcttcagccactgactgcttgggttgggctgtgaatgataatggaatggctggagtctgctgttgtcagaaggcagggagggtgatgaaggactgacccacatggactgggatgtgtgtcggttatgggcatgactgcacgttcactctcagtgggatctgggcaacatggagttcattgtcctgttgcttacttactgcaatgtctttggccctccttttcaactggttcctctgttgggcccaaaggttgggagtaggagacagtatcccaggctgacaagggcttgccctttaccttgggcaccttgttaatttttagcctgt

SEQ ID NO: 9538 - DNA, 422 bp, Homo sapiens
ccaggggagggctccatggttctttagcacaggctgtggcctcacacactccagtctccatggtaacccaagcactcaggctattatgtcccacacctcctcgctggcctgcttctgtcaactctacgctggtagaagatctcggcattagctgtctggggaagctaacttcctacagtgggttttagttgagttaatcaccactggtgtaaaacgcttgtgcatcttaggaacccaaatcttccccaaattctagacaatcccacaaaatgctagtatctaggtttagatctaggtcctgtcttccgtttgaagccttcagggtaaaggagggcagagataaggctctctcctggggaaaggagttctacacaaaaatgacctcagaatgggggccattagcctcaagcatctgtgtgagg

SEQ ID NO: 9539 - DNA, 362 bp, Homo sapiens; identical to SEQ ID NO: 6999

SEQ ID NO: 9540 - DNA, 336 bp, Homo sapiens
aaaattacaattgaagtaaaataatgtgtcttatttcagtataaaggatcatttgaaactgttgattccaaacatcaactaatattatatagtcatcagtagaattataaggatgccatatcatgacattttagaagtggagagtgcatcatatgtagaaaataaatattcagacgtggctcattaatgttactaagttggaagtgagaatttatgaacattaattcattttaagaaaagtgcagccaggcgcagtggctcatgcctgtaatcctagcactttgggaggccaaagtgggcagatcacctgaggtcaggagttcaagaccagcctgg

SEQ ID NO: 9541 - DNA, 490 bp, Homo sapiens
ccagcaaacttgaggctcctttcactcaggatgacacccttggactggaaaactcacacccggtctggacacagaaagagaaccaacagctcatcaaggaagtggatgccaaaactactcatggaattctacagaaaccagtggaggctgacaccgacctcctgggggatgcaagcccagcctttgggagtggcagctccagcgagtctggcccaggtgccctggctgacctggattgctcaagctcttcccagagcccaggaagttctgagaaccaaatggtgtctccaggaaaagtgtctggcagccctgagcaagccgtggaggaaaaccttagttcctattccttagacagaagagtgacacccgcctctgagaccctagaagacccttgcaggacagagtcccagcacaaagcggagactccgcacggagccgaggaagaatgcaaagcggagactccgcacggagccgaggaggaatgccggca

SEQ ID NO: 9542 - DNA, 526 bp, Homo sapiens
aaacatcatccttgtcttgtgaagaaaacaggaagaatgtcatgtaccatgtggatcaccttcagttcaaagttgcagcaaagtgaagaaagaaactactggaagccacccagcaatgcactgtttagtcatcaattaggagcccatgggaggataatagggagactgggtggaggctcagtgtgtaataatctcttgtctaatgtatgtgtgtcactgccatgttgtatgaacaatagtgagggctcacatttacttaacacttgtgtgcgcaaatctgggttcttcttcctttccagaactatgactcgatcataaaatctgttttgtttgcatgcatgcccaaaacaaccctgtaagtagaacattgtcattatctctgttttagagatgaggaaacaggctcagagaagctcagaaatttgttcaagatcgcacagctagtaaatggcagaagtaggattgtgaacccagggaatctccagagcctctgtgtaaccatgatgttatattttttttcctcttt

SEQ ID NO: 9543 - DNA, 327 bp, Homo sapiens; identical to SEQ ID NO: 179
  misc_feature (1)...(327): n = g, a, c or t

SEQ ID NO: 9544 - DNA, 192 bp, Homo sapiens; identical to SEQ ID NO: 180
  misc_feature (1)...(192): n = g, a, c or t

SEQ ID NO: 9545 - DNA, 171 bp, Homo sapiens; identical to SEQ ID NO: 181
  misc_feature (1)...(171): n = g, a, c or t

SEQ ID NO: 9546 - DNA, 318 bp, Homo sapiens
aaagaaattggagatattgctggtgttgctgatgttacaatcagacagtcctatagactgatctatcctcgagccccagatctgtttcctacagacttcaaatttgacaccccagtggacaaactaccacagctataaattgaggcagctaacgtcaaattcttgaatacaaaactttgcctgttgtacatagcctatacaaaatgctgggttgagcctttcatgaggaaaaacaaaagacatggtacgcattccagggctgaatactattgcttggcattctgtatgtatatactagtgaaacatatttaatgattt

SEQ ID NO: 9547 - DNA, 301 bp, Homo sapiens
aaagaaggggacaaagctgaaccagccacttggaagacgaggttacgctgtgctttgaataagagcccagattttgaggaagtgacggaccggtcccaactggacatttccgagccatacaaagtttaccgaattgttcctgaggaagagcaaaaatgcaaactaggcgtggcaactgctggctgcgtgaatgaagttacagagatggagtgcggtcgctctgaaatcgacgagctgatcaaggagccttctgtggacgattacatggggatgatcaaaaggagcccttccccgccggagg

SEQ ID NO: 9548 - DNA, 136 bp, Homo sapiens; identical to SEQ ID NO: 178
  misc_feature (1)...(136): n = g, a, c or t

SEQ ID NO: 9549 - DNA, 220 bp, Homo sapiens
cctgggatgcagggagaaaggctgaccacaagttgagacaagatacagaaacaaacaaaaacagcagaaagtccgatcgatggtgtaagtgttgtgttcactgcttagggtgcaggtgagcttgatcgaggctcccagtaaggcagatgtagacgggggctgagtcagcacaggcagagcacagagacctgtggagaaaatgaagggcagtaggtagaag

SEQ ID NO: 9550 - DNA, 373 bp, Homo sapiens; identical to SEQ ID NO: 182

SEQ ID NO: 9551 - DNA, 181 bp, Homo sapiens
ggcctgggcaggtttcatggtcctgctgatgatcccatggggctctgctgcaaaactggtctgctacttcaccaactgggcccagtacagacagggggaggctcgcttcctgcccaaggacttggaccccagcctttgcacccacctcatctacgccttcgctggcatgaccaaccaccag

SEQ ID NO: 9552 - DNA, 297 bp, Homo sapiens
ctggagcccttccctgagaaactcttacaggccaggaagccagtacagacctttgagaggtctgtgtacagtgacaggtatatctttgcaaagaatctttttgaaaatggttccctcagtgacatcgagtggcatatctatcaggactggcattcttttctcctgtgggagtttgccagccggatcacattacatggcttcatctacctccaggcttctccccaggtttgtttgaagagactgtaccagagggccagggaggaggggaaaggaattgagctggcctatctagagcag

SEQ ID NO: 9553 - DNA, 583 bp, Homo sapiens
ctgtgcattctctcctgactcttctatgctgtgttcagtcggagccagtaaagcagttttcctttggaatatggataaatacaccatgatacggaaactagaaggacatcaccatgatgtggtagcttgtgacttttctcctgatggagcattactggctactgcatcttatgatactcgagtatatatctgggatccacataatggagacattctgatggaatttgggcacctgtttcccccacctactccaatatttgctggaggagcaaatgaccggtgggtacgatctgtatcttttagccatgatggactgcatgttgcaagccttgctgatgataaaatggtgaggttctggagaattgatgaggattatccagtgcaagttgcacctttgagcaatggtctttgctgtgccttctctactgatggcagtgttttagctgctgggacacatgacggaagtgtgtatttttgggccactccacggcaggtccctagcctgcaacatttatgtcgcatgtcaatccgaagagtgatgcccacccaagaagttcaggagctgccgattccttccaagctt

SEQ ID NO: 9554 - DNA, 498 bp, Homo sapiens
  misc_feature (1)...(498): n = g, a, c or t
ctgtgaactgcttgttagcnntcttcanggtgcctttcgagaaataatacaccttgttcacttcaataagaggaaagaactngtccacttgctcatngaaanctgtanctcggatttcaccactttngtcaaccagntctagggagaaaagcttcccttnccctcnggagtngctccaggtacngatctgacttttgttggtaacacnancacaaatggnccacttggactggnaaggagtgaggctggcantgggcaccactttggactgngtncccccagaagtgtgtgacaggctgggacctgcagctttnccaaatgtctttgaagcaccatangccttanaaacagtnnaacccattcccgagcttncattctgcggctggggcctgctgcttgctgctgggctggctgctggcgctggaggagctacttgcggctgcccgagnccttcattatagggcactggattgccaatcttcactncaactgcttcag

SEQ ID NO: 9555 - DNA, 585 bp, Homo sapiens; identical to SEQ ID NO: 183

SEQ ID NO: 9556 - DNA, 349 bp, Homo sapiens; identical to SEQ ID NO: 640

SEQ ID NO: 9557 - DNA, 127 bp, Homo sapiens
ctgtatcaaatgaaccgagttggaggaaattgtataggagtatatcttaatggcactacagcaaactgtgttaaatttgggtttttggcaaagattgaagaaaactggtattcaagatgtactgcag

SEQ ID NO: 9558 - DNA, 389 bp, Homo sapiens
aaaggaaaaaaaaagttcagtcagaagttgaatgtccccataaggagtaacagaggtcattcctgattaatctaatttaatctttataattcaaggatcctcccagccaaaacaatctcaggtatccgattttatgcaattcattttgtgagtaacatcacagaaggattgagtaggatactggtttaaccatgggcataacattttttttttcagtattgaagagtaaagctaaagtttgttcactaagatgtttaattcaagccccagtaacagagatacacaactgccaaagtcagctcttaggggtgttgtaccaggaggtggtgtaaacagatctggacccagagaattagaaagaaaaggcagaatgaagttcacaacagcag

SEQ ID NO: 9559 - DNA, 337 bp, Homo sapiens
ctggctgatgtctgcttggacactccactctgtaatgggcacaccacagggatggatgtcctctgggcagggacccccatggtgaccatgccaggagagactcttgcttctcgagttgcagcatcccagctcacttgcttaggttgtcttgagcttattgctaaaaacagacaagaatatgaagacatagctgtgaagctgggaactgatctagaatacctgaagaaagttcgtggcaaagtctggaagcaaagaatatctagccctctgttcaacaccaaacaatacacaatggaactagagcggctctatctacagatgtgggagcattatgcag

SEQ ID NO: 9560 - DNA, 584 bp, Homo sapiens
  misc_feature (1)...(584): n = g, a, c or t
aaaagttataataataaatacccacacatgtaattatacattctaggctgggagtgggggctcacacctggaatcccagcactttgggaggccgaggccggtggatcacctgaggtcattgggagttcgagaccagcctgaccaacatggagaatccctgtctctactaaaaatacaaagttagccaggcatggtggcacatacctgtaatcccagctacttgggaggctgaggcaggagaatcacttgaacccgggaggtggaggtagtggtgagccgagattgtgccattgcactccagcctgggcaacaaaagcgaaactccgtctcaaaaaaaagttacacattcgttcctattatccttgccgtaaataaatgtgacaaagctgaggctgatcctgagaaagtgaaaaaagagctgctggcttacgatgtggtatgtgaagattatggaggtgatgttcaagcagtgcctgtctccgcacttacgggcgataatctgatggctttggcagaagcaacagttgctcttgcagaaatgttagaattgaaagcagatcccaatggtncagtggaaggaacag

SEQ ID NO: 9561 - DNA, 255 bp, Homo sapiens
cctggatcccggcctttccctgtgacttacgtgtctgtcaccggcaggcagccctacaaatcctggtgacctgctctcccaagaacagagcctgtccccagatgtcccagtagcgatgagtaacagaggtggctgtggacttcctctacttctccttgctggatcagggccttcctgcctcccgctgggcaggtctggccttgctctcttggcagggccccagcccctctgaccactctgcagctcaccatgcag

SEQ ID NO: 9562 - DNA, 357 bp, Homo sapiens
aaatacacagacgggcgagtggcgcccgtgtcgatgtcttcagccagtggtgaccctgcttttgtaaccgcgtcaacctgacaaaacctcagcagcagaagtccctatttttctaggagttcatcgtgcagacagtcttcactacaggactcggccctggggcctctgcctctcgtctgaccttgcagccttagtcgttggaggctggagcgcaatggccctgccgtctgtggagcctctgggcggccttctttcctttctgtcaacctctcatttcacagaaaaaggctgaatttcattttttccagcatgaaagccaggatcggttagtggttggattctattggtttttttttt

SEQ ID NO: 9563 - DNA, 155 bp, Homo sapiens; identical to SEQ ID NO: 184
  misc_feature (1)...(155): n = g, a, c or t

SEQ ID NO: 9564 - DNA, 248 bp, Homo sapiens
aaaaatgttagagctgttttacaattattttcacttccctagctttctgagcctgtaagtctctcttccctatttcaacattcatcctaaagagttttcaattagtatgtgaaaccaaaaggtcagagtgttttagtctgatacaaatcatccctaactaaaatgattccagtatgtgcttccatttcattaaaactgttctgtgaaaatttggatatcctcaggaatgcattattacagaataattt

SEQ ID NO: 9565 - DNA, 257 bp, Homo sapiens
gtgaaatcatacaggaagtgggaaaactctatccactggagatagtatttggaatgaatggaagaatatgggttaaggcaaaaaccatccagcagactttaattttggcaaacattttagaagcttgtgaacacatgacgtcagatcaaagaaaacagatcttctccagattggcagaaagttgatataggtggacttttttacaggtcagttgaggcaaaaaactatgggttttttcaggtgaacctcccccattt

SEQ ID NO: 9566 - DNA, 119 bp, Homo sapiens; identical to SEQ ID NO: 185
  misc_feature (1)...(119): n = g, a, c or t

SEQ ID NO: 9567 - DNA, 579 bp, Homo sapiens; identical to SEQ ID NO: 340

SEQ ID NO: 9568 - DNA, 460 bp, Homo sapiens
ctgtgccaggctgtcaagttcctccatgataacaagctgacacatacagacctcaagcctgaaaatattctgtttgtgaattcagactatgagctcacctacaacctagagaagaagcgagatgagcgcagtgtgaagagcacagctgtgcgggtggtagactttggcagtgccacctttgaccatgagcaccatagcaccattgtctccactcgccattaccgagcaccagaagtcatccttgagttgggctggtcacagccttgtgatgtgtggagtataggctgcatcatctttgaatactatgtgggattcaccctcttccagacccatgacaacagagagcatctagccatgatggaaaggatcttgggtcctatcccttcccggatgatccgaaagacaagaaagcagaaatatttttaccggggtcgcctggattgggatgagaacacatcag

SEQ ID NO: 9569 - DNA, 449 bp, Homo sapiens
aaaccgtagttggcgcagaggtcagtcctagtcggagcttaggaggggcggagacgctcacatcgtctgacttgagtcgccactgattgtggcaacagctttgcctcatgagtcaaaaattggcaatttcttttgatttttagttgttgaatttgctgtttcaagcatttgtacatattagaagtctaaggagtagcaagtcagtgggaggactttttcacccctggcattagcagcttcgacctcattttccagatgcaccagctcctattaataagttagcaaggaaagtgtatgtcacgtgcaggaacagtgaggcagggacaggggttctgctccttctcacttcaccaccggcacacggcttgcccctgtctttgcccccaaaggtattttgtgtctagtgtcacattggagctattcttcactggtccttaaccttgggtttt

SEQ ID NO: 9570 - DNA, 101 bp, Homo sapiens; identical to SEQ ID NO: 186
  misc_feature (1)...(101): n = g, a, c or t

SEQ ID NO: 9571 - DNA, 84 bp, Homo sapiens; identical to SEQ ID NO: 188
  misc_feature (1)...(84): n = g, a, c or t

SEQ ID NO: 9572 - DNA, 307 bp, Homo sapiens
ctggggagagctaaaggactttgatgtgtaactgtgctgttgatgaagtcctcccagggaagcctgtgcagatgcagtcacctggaaagaacagagattaccctttcacctacctcagcaaaacaaactttcaagtcttgatagacttagcctagtaattttatagtgagagtttcaaactatatatcagtgtctatagcatcaaaaacttctgggggcgtgggggaagtagaataccaagtataatagttacattcactttcaaagagcatctatgaatttgccttttgtaacttactgtggcttt

SEQ ID NO: 9573 - DNA, 139 bp, Homo sapiens; identical to SEQ ID NO: 189
  misc_feature (1)...(139): n = g, a, c or t

SEQ ID NO: 9574 - DNA, 283 bp, Homo sapiens; identical to SEQ ID NO: 190
  misc_feature (1)...(283): n = g, a, c or t

SEQ ID NO: 9575 - DNA, 178 bp, Homo sapiens
aaaacagaaaaaatgcaaaactagggaagagaaccctagatattcactagggaaggtaccaaaatttccagaatcaaaaattccatcttctactggatgagtaaggtccaaattaaacctccaggttgacctcttgggcttcctgtctttctgcggcgccatcttgcgagtcggccgc

SEQ ID NO: 9576 - DNA, 261 bp, Homo sapiens
ccagcccgaagtcgacccctcagtcttgcttggatcatgccagccttcacccatctttgtgccctgaggtcttgggtgccaagggcagggcatcacagtcctctggctagctcccttctgagttggagctccctcaggagccccgcccaccctaagtgctggtctccacaatgcacttgaggaacattgtgtcgtccttcacgtaggcgtgcttgggtgactgcagtttgctgagggggaagaagagtgggcatccactgg

SEQ ID NO: 9577 - DNA, 224 bp, Homo sapiens
ccacctgaggacagcaccgctcacttcctcttgagggaacccttgctcttctccttgtctgctgaccgctgcttcttcactttctcctccctcttgttcttagtgtgcaggttctcatacacatcctccttgtgtctgcagccgggtgcaggggggcaagtacaggcagttggtgcaggtcaggagacagcacagggggacccggcactggcagtcccctctgg

SEQ ID NO: 9578 - DNA, 239 bp, Homo sapiens; identical to SEQ ID NO: 187

SEQ ID NO: 9579 - DNA, 307 bp, Homo sapiens
cctagggaaatccaccctcatcaacagcctcttcctcaccaacctctatgaggatcgccaggtgccagaggccagtggtaagaccctccccaccctcttgaggcagtagcccctgtccccaggttacaccctagtcttttccatctggggactcaggtagttgactgctttttttctgagactttcctcccctgggaaatgggtgcaggcaactgtgatattgacaaaggaaattaattctgcctcagagcctccccggatccctgacctctcccccatcccacagctcgcttgacacagaccctgg

SEQ ID NO: 9580 - DNA, 179 bp, Homo sapiens; identical to SEQ ID NO: 191
  misc_feature (1)...(179): n = g, a, c or t

SEQ ID NO: 9581 - DNA, 280 bp, Homo sapiens
ccagtgtggcggctcatgcctgtaatcccaacactttgggagaccaacatgagaggaacacgtgaggccaggagttcaagaccagctcagcaacacagcaagaccctgtctctacaaaaaaataaaattagccaggcatagtggcatacacttgtagtcccagctactcaggaggctgagataggagaattgcttgagcccagaaggtcaaggctgcaggtgagccatgatctcgccattgtactccagcctgggtaacagaatgaaagcctgtctcttt

SEQ ID NO: 9582 - DNA, 54 bp, Homo sapiens; identical to SEQ ID NO: 195
  misc_feature (1)...(54): n = g, a, c or t

SEQ ID NO: 9583 - DNA, 375 bp, Homo sapiens; identical to SEQ ID NO: 50

SEQ ID NO: 9584 - DNA, 130 bp, Homo sapiens; identical to SEQ ID NO: 197
  misc_feature (1)...(130): n = g, a, c or t

SEQ ID NO: 9585 - DNA, 464 bp, Homo sapiens
aaaagaaattggtaacatcactttctcagactcctctcctacatttctttaaccactgctcagcctcctttaccaagtcctttgactcttgtaaaatgttgatattcccagggttttctcaatggctttctttttattctacatcttctgcctcatggataagctcattgagatctatggctttgcctaataattataataaaagtattctaagcctgcattttcaaccagagttctatctccagctagaaatgcatataatccaattgcctactgaatgtatcccccatgaatgtttcattgaactcaacatgtgaagaaaactattggtctgtcccatgactgtttgcacttctctgttaacctgacaaattcctactccttccccatgagcattgtaaatccttgtgcacaatctgaaaacttatgagtgacctgagattttatctatcccctagcttttt

SEQ ID NO: 9586 - DNA, 90 bp, Homo sapiens; identical to SEQ ID NO: 192
  misc_feature (1)...(90): n = g, a, c or t

SEQ ID NO: 9587 - DNA, 585 bp, Homo sapiens; identical to SEQ ID NO: 183

SEQ ID NO: 9588 - DNA, 283 bp, Homo sapiens; identical to SEQ ID NO: 194

SEQ ID NO: 9589 - DNA, 191 bp, Homo sapiens; identical to SEQ ID NO: 198
  misc_feature (1)...(191): n = g, a, c or t

SEQ ID NO: 9590 - DNA, 238 bp, Homo sapiens
ctgacaaagtagtattttagaaaagttctaaagttataaaaatgttttctgcagtaaaaaaaaagttctttgggccgggcggggtggctcacacctgtaatcccagcaccttgggaggctgaggtgggaggatcatttgaggccaggagtttgagacctgcctgggcaacataatgaaacttcctttccagggagaaaaaaaaaaaaaaaaaagctctgagagcatcttattttgttt

SEQ ID NO: 9591 - DNA, 424 bp, Homo sapiens
  misc_feature (1)...(424): n = g, a, c or t
aaaaactccctatttatttttgttttttttttttcttcttttcctacgcaccattagccctaaaacgttgagagtaaacacttaccgaaagccgaccctggaccatgtgtctttagccatctcttggtgatgttgccaggaggatgggtcagtccaggagtggcagggcctaggtggcacctggaggtgaacacctaaccgcatgagtccttttccactgtcaggctacncggaaatactgttggtaggggggcgtntctgctgttggcagtgagaggtanaaactnggggttcttccttgctctcccctgacagacaaaaaagttcctcccccatggcttccaagctgtttccccctgtaagggaagctcgagagagagtctgctgttcagccatctgactgcttctaaatctgcttttcagg

SEQ ID NO: 9592 - DNA, 206 bp, Homo sapiens
  misc_feature (1)...(206): n = g, a, c or t
atttcatganacaagctggggaagtaacntttgcanatgcacaccgacctaaattaaatgaaggggtggttgagtttgcctcttatggtgacttaaagaatgctattgaaaaactttctggaaaggaaataaatgggagaaaaataaaattaattgaaggcagcaaaaggcacagtaggtcaagaagcaggtctcgatcccggacc

SEQ ID NO: 9593 - DNA, 290 bp, Homo sapiens
cctgtcacatgtggacctgtcacgtgtggactgtcacgtgtggacctgtcatgcatgcaccagtcacgtgtggacctgtcacgtgtgaacctgttgtgtggtcctgtcgtctgtgggcctgtcacgtgtggacgtgtcacgtgtggacccggctgaaggcaggatgcctcagccaatcctatgcctgggcagggcgggggatgcctctgcattttctgagccccatggccctgcagtgctgctgggtggctgtcacagacccaggccagcccctcctcccaggcaggcag

SEQ ID NO: 9594 - DNA, 282 bp, Homo sapiens; identical to SEQ ID NO: 199

SEQ ID NO: 9595 - DNA, 491 bp, Homo sapiens
aaagagaaacttaaatcctgttgtattctttcaacacaagcaatgatacttctcagagtctgctcaaaagctcagctctgtggactccgtgacaaaatgtacgcgtccactgccgaccctcttggtttctgaaaccaacctttcttcctgctctcctctttaagagcaaaccccaacatgtataaggtcacagcaagtggtagccagaaaaagctgtgggacccctcatttgagtcacatccatatggcatggagaaagaaaacctctctgccagaaggaactgaactctggaagtcctaaggaaggtcaccatgctcagcagataggaaagcattgccaagggctgtccctcaagagcttagttttcttagggagaccagaaagacatcagatcctgactgccctgttttgctcaagttctgaaatgagtggcatgatgaagagctggtggagctgagggaaagagtcaaccatgtggggtggggtagtg

SEQ ID NO: 9596 - DNA, 556 bp, Homo sapiens
  misc_feature (1)...(556): n = g, a, c or t
aaatcaactaaagactcatgagatttatttggttacagtgaataacctggacaaaatgttgagaagagttgttaaaacaagtttacattaaatatactaacaattacgtttggttacatatttgtaagtgatggttatttagaaaaactgcatanaaatccaaaccttaaatattctgcaaatcaaatcattagcttttctcttctctaataaagtagggtgactagttcttggattaatctaactataacattaatgtagcacttgattatcttatggaataattctctatctcatctaagcctcacaacaaccttgtaaagtattatccccattttatggaggaagaaacaggcttagaagtggaaaggtagattctctgctcgcacaaccgtattatgtggctaagctattgaacttgaacctagatttgggacttcatttcaaatatgaaattttttgattaaatctttttatcttgtatggaaaaaatatctcattagctgtcagatgttatttaccctgctaactgttaaaaatatttcattaaaaaaat

SEQ ID NO: 9597 - DNA, 261 bp, Homo sapiens
  misc_feature (1)...(261): n = g, a, c or t
aagctttttttttttttttttttttttttttttgngaaaatanctttatttcattgnggggagcgggccgatgtccancctcanaacttntggaactgcttnttggtgccggcagccttggtgaccttgagcacgttgaagcgcactgtcttgctcanaggccggcactcgcccactgtgacgatgtcaccgatctggacgtccctgaagcagggggacaggtgtacanacatgttnttgnggcgcttntcnaagcggttg

SEQ ID NO: 9598 - DNA, 622 bp, Homo sapiens
gcacacaaattgacttattagaaggcaatgtagcatcaggaaaagtagatgtgaatgaacagagtggtcagaggagaagttgtatttggttgaaccttgaaattaaaaatgatagaggaattattattgggaccgttgttaggaataatgacttttccactgcaagactgaagatatcagtgcccctctatattctgtgcaaaaggtgtctttgactcatccaaaaaattgaacagtttcctgtctcatggagatctatcacaaagtctttaaatattactacccatgaaattggccagggttaggacattcaaatgtctttatccacattcctgaaggataattgttatagattccctacctccataggaatgcttataatggattatctatacaatctccacattcccacattttgcattagagaatggaatcagtcaaaccctgttcccagagtttcccttagagttctcacctgttgtcttatatccatctaggaatccccatctctaatgtaagcttggagatccgggcccccgggggacaggtgactgaaggacaaaaactgatcctgctctgctcagtggctgagggtacaggaaatgtcacattctcctggtac

SEQ ID NO: 9599 - DNA, 523 bp, Homo sapiens
ctgtcatgaggtctcttctatagccatcaggtcttctcacagggatattcaccaccttgctctggataggcacatggccgttgtcagctctacagtaatatttgccggcatcactctctttcacagctgggatctccagctctgctgacagggaacgctgggttttctttcccatactggttcctgtggcctctctgtaccaggagaatgtgacatttcctgtacccccagccactgagcagagcaggatcagtttttgtccttcagtcacctgtcccccgggggcccggatctccaagcttacattagagatggggattcctagatggatataagacaacaggtgagaactctaagggaaactctgggaacagggtttgactgattccattctctaatgcaaaatgtgggaatgtggagattgtatagataatccattataagcattcctatggaggtagggaatctataacaattatccttcaggaatgtggataaagacatttgaatgtcctaaccctgg

SEQ ID NO: 9600 - DNA, 1908 bp, Homo sapiens
  misc_feature (1)...(1908): n = g, a, c or t
gacactcaacttcacagtgcctactggggccagaagcaatcatcttacctcaggagtcattgaggggctgctcagcacccttggnccagccaccgtggccttattattttgctacggcctcaaaagaaaaataggaagacgttcagccagggatccactcaggagccttcccagccctctaccccaagagttcacctacctcaactcacctaccccagggcagctacagcctatatatgaaaatgtgaatgttgtaagtggggatgaggtttattcactggcgtactataaccagccggagcaggaatcagtagcagcagaaaccctggggacacatatggaggacaagatgcagtcactgaacaggcagattcgctgacccttgtggcgccctcttctgtcttcgaaggagacagcatcgttctgaaatgccagggagaacagaactggaaaattcagaagatggcttaccataaggataacaaagagttatctgttttcaagaaaattctcagatttccttatccaaagtgcagttttaagtgacagtggtaactatttctgtagtaccaaaggacaactctttctctgggataaaacttcaaatatagtaaagattaaaagtccaaggaatccccatctctaatgtaagcttggagatccgggcccccgggggacaggtgactgaaggacaaaaactgatcctgctctgctcagtggctgggggtacaggaaatgtcacattctcctggtacagagaggccacaggaaccagtatgggaaagaaaacccagcgttccctgtcagcagagctggtagatcccagctgtgaaagagagtgatgccggcaaatattactgtagagctgacaacggccatgtgcctatccagagcaaggtggtgaatatccctgtgagaattccagtgtctcgccctgtcctcacccctcaggtctcctggggcccaggctgcagtgggggacctgctggagcttcactgtgaggcccctgagaggctctcccccaatcttgtaccaattttatcatgaggatgtcacccttgggaacagctcggcccctctggaggaggggcctccttcaacctctctttgactgcagaacattctggaaactactcctgtgaggccaacaacggcctgggggcccagtgcaggtggagggcagtgccaggtcctccatctcaggacctgatggctatagaaagagacctcatgacagctggagttctctggggacctgtttggtgtccttgcgttcactgggtgttgctttgctgttgtatgccttgttccacaagatatcaggagaaagttctgccactaatgaacccagaggggcttccaggccaaatcctcaagagttcacctattcaagcccaaccccagacatggaggagctgcagccacgtgtatgtcaatgtgggctctgtagatgtggatgtggtttattctcaggtctggagcatgcagcagccagaaagctcagcaaacatcaggacacttctggagaacaaggactcccaagtcatctactcttctgtgaagaaatcataacacttggaggaatcagaagggaagatcaacagcaaggatggggcatcattaagacttgctataaaaccttatgaaaatgcttgaggcttatcacctgccacagccagaacgtgcctcaggaggcacctcctgtcatttttgtcctgatgatgtttcttctccaatatcttcttttacctatcaatattcattgaactgctgctacatccagacactgtgcaaataaattatttctgctaccttctcttaagcaatcagtgtgtaaagatttgagggaagaatgaataagagatacaaggtctcaccttcatctactgtgaagtgatgagaacagg

SEQ ID NO: 9601 - DNA, 1329 bp, Homo sapiens
ccacgcgtccggtcctgaactgggctgaataaacatacctaaatatatgtttagaaatgctcctatgtatcagttttcccaggaacaactataatattatagaaatcttaaaattatttcctaataaaaaattataggatacaaaagaaaaaaaagaaatatgaagagggctggatgggcacaggaaaacaatcagatgagaacaacagatgaccgtgtctgcaggcagcacccagaactgatattcccctcaaacgtctaaatatattgttgagaaaattatctctaactgttctagtgggaatgtgggaatggaaaatatgcaacagccatggggccaggccctttgctgagcctgcaggttgggagtttgtgaatctattgaggcatcacaaatcttttctgatagcccctctgtgtctgtcagttccagtgtctcgccctgtcctcaccctcaggtctcctggggcccaggctgcagtgggggacctgctggagcttcactgtgaggccctgagaggctctcccccaatcttgtaccaattttatcatgaggatgtcacccttgggaacagctcggccccctctggaggaggggcctccttcaacctctctttgactgcagaacattctggaaactactcctgtgaggccaacaacggcctgggggcccagtgcagtgaggcagtgccagtctccatctcaggacctgatggctatagaagagacctcatgacagctggagttctctggggactgtttggtgtccttggtttcactggtgttgctttgctgttgtatgccttgttccacaagatatcaggagaaagttctgccactaatgaacccagaggggcttccaggccaaatcctcaagagttcacctattcaagcccaaccccagacatggaggagctgcagccagtgtatgtcaatgtgggctctgtagatgtggatgtggtttattctcaggtctggagcatgcagcagccagaaagctcagcaaacatcaggacacttctggagaacaaggactcccaagtcatctactcttctgtgaagaaatcataacacttggaggaatcagaagggaagatcaacagcaaggatggggcatcattaagacttgctataaaaccttatgaaaatgcttgaggcttatcacctgccacagccagaacgtgcctcaggaggcacctcctgtcatttttgtcctgatgatgtttcttctccaatatcttcttttacctatcaatattcattgaactgctgctacatccagacactgtgcaaataaattatttctgctaccttaaaaaaaaaaaaaaa

SEQ ID NO: 9602 - DNA, 1569 bp, Homo sapiens
  misc_feature (1)...(1569): n = g, a, c or t
tgctgccaaatgggacagcacacagcctgtgcacatactgacatgtgatgggtctccccacgggggctgcatttcacactcctccacctntctcaaactctaaggtcggcacttgacaccaaggtaacttctctcctgctcatgtgtcagtgtctacctgcccaagtaagtggctttcatacaccaagtcccaagttcttcccatcctaacagaagtaacccagcaagtcaaggccaggaggaccaggggtgcagacagaacacatactggaacacaggaggtgctcaattactatttgactgactganaaaaatgnntgantgattgaggaagaaaactgtgggtaatcaaactggcataaaatccagtgcactccctaggaaatccgggaggtattctggcttccctaagaaacaacggaagagaaggagcttggatgaggaaactgttcagcaagaggaagggcttctcacactttcatgtgcttgtggatcacctgaggatcctgtgaaaatacagatactgattcagtgggtctgcgtagagcctgagactgccattctaacatgttcccaggggatgctgatgctgctggccctgggactgcactgcatgcatgtgaagccctataggtctcagcagaggcccatggagagggaatgtgtggctctggctgcccagggcccaactcggttcacacggatcgtgctgctccctggccagcctttggccacagcaccaccagctgctgttgctgagagagcttcttctctgtgacatgttggctttcatcagccaccctgggaagcggaaagtagctgccactatctttgtttccccacctcaggcctcacactttcccatgaaaagggtgaatgtatataacctgagccctctccattcagagttgttctcccatctctgagcaatgggatgttctgttccgcttttatgatatccatcacatcttatcttgatctttgctcccagtggattgtacagtgatgacttttaagccccacggccctgaaataaaatccttccaagggcattggaagctcactccacctgaaccatggcttttcatgcttccaagtgtcagggccttgcccagatagacagggctgactctgctgccccaacctttcaaggaggaaaccagacacctgagacaggagcctgtatgcagcccagtgcagccttgcagaggacaaggctggaggcatttgtcatcactacagatatgcaactaaaatagacgtggagcaagagaaatgcattcccaccgaggccgcttttttaggcctagttgaaagtcaagaaggacagcagcaagcataggctcaggattaaagaaaaaatctgctcacagtctgttctggaggtcacatcaccaacaaagctcacgccctatgcagttctgagaaggtggaggcaccaggctcaaaagaggaaatttagaatttctcattgggagagtaaggtacccccatcccagaatgataactgcacagtggcagaacaaactccaccctaatgtgggtggaccccatccagtctgttgaagg

SEQ ID NO: 9603 - DNA, 800 bp, Homo sapiens
ctgataacgttcacagccccatcctcagcacgtggattcgagtcaccgtgagaattccggtatctcaccctgtcctcaccttcagggctcccagggcccacactgtggtgggggacctgctggagcttcactgtgagtccctgagaggctctcccccgatcctgtaccgattttatcatgaggatgtcaccctggggaacagctcagccccctctggaggaggagcctccttcaacctctctctgactgcagaacattctggaaactactcctgtgatgcagacaatggcctgggggcccagcacagtcatggagtgagtctcagggtcacagttccggtgtctcgccccgtcctcaccctcagggctcccggggcccaggctgtggtgggggacccgctggagcttcactgtgagtccctgagaggctccttcccgatcctgtactggttttatcacgaggatgacaccttggggaacatctcggcccactctggaggaggggcatccttcaacctctctctgactacagaacattctggaaactactcatgtgaggctgacaatggcctgggggcccagcacagtaaagtggtgacactcaatgttacaggaacttccaggaacagaacaggccttaccrctgcgggaatcacggggctggtgstcarcatcytcgtccttgywgctgctgctgctctgctgcattacgccagggcccgaaggaaaccaggaggactttctgccactggaacatctagtcacagtcctagtgagtgtcaggagccttcctcgtccagg

SEQ ID NO: 9604 - DNA, 2474 bp, Homo sapiens
ctcaatcagctttatgcagagaagaagcttactgagctcactgctggtgctggtgtaggcaagtgctgctttggcaatctgggctgacctggcttgtctcctcagaactccttctccaatcctggagcaggcttccatgctgctgtgggcgtccttgctggcctttgctccagtctgtggacaatctgcagctgcacacaaacctgtgatttccgtccatcctccatggaccacattcttcaaaggagagagagtgactctgacttgcaatggatttcagttctatgcaacagagaaaacaacatggtatcatcggcactactggggagaaaagttgaccctgaccccaggaaacaccctcgaggttcgggaatctggactgtacagatgccaggcccggggctccccacgaagtaaccctgtgcgcttgctcttttcttcagactccttaatcctgcaggcaccatattctgtgtttgaaggtgacacattggttctgagatgccacagaagaaggaaagagaaattgactgctgtgaaatatacttggaatggaaacattctttccatttctaataaaagctgggatcttcttatcccacaagcaagttcaaataacaatggcaattatcgatgcattggatatggagacgagaatgatgtatttagatcaaatttcaaaataattaaaattcaagaactatttccacatccagagctgaaagctacagactctcagcctacagaggggaattctgtaaacctgagctgtgaaacacagcttcctccagagcggtcagacaccccacttcacttcaacttcttcagagatggcgaggtcatcctgtcagactggagcacgtacccggaactccagctcccaaccgtctggagagaaaactcaggatcctattggtgtggtgctgaaacagtgaggggtaacatccacaagcacagtccctcgctacagatccatgtgcagcggatccctgtgtctggggtgctcctggagacccagccctcagggggccaggctgttgaaggggagatgctggtccttgtctgctccgtggctgaaggcacaggggataccacattctcctggcaccgagaggacatgcaggagagtctggggaggaaaactcagcgttccctgagagcagagctggagctccctgccatcagacagagccatgcagggggatactactgtacagcagacaacagctacggccctgtccagagcatggtgctgaatgtcactgtgagagagaccccaggcaacagagatggccttgtcgccgcgggagccactggagggctgctcagtgctcttctcctggctgtggccctgctgtttcactgctggcgtcggaggaagtcaggagttggtttcttgggagacgaaaccaggctccctcccgctccaggcccaggagagtcctcccattccatctgccctgcccaggtggagcttcagtcgttgtatgttgatgtacaccccaaaaagggagatttggtatactctgagatccagactactcagctgggagaagaagaggaagctaatacctccaggacacttctagaggataaggatgtctcagttgtctactctgaggtaaagacacaacacccagataactcagctggaaagatcagctctaaggatgaagaaagttaagagaatgaaaagttacgagaacgtcctactcatgtgatttctcccttgtccaaagtcccaggcccagtgcagtccttgcggcccctggaatgatcaactcattccagctttctaattcttctcatgcatatgcattcactcccaggaatactcattcgtctactctgatgttgggatggaatggcctctgaaagacttcactaaaatgaccaggatccacagttaagagaagaccctgtagtatttgctgtgggcctgacctaatgtattccctagggtctgctttagagaagggggataaagagagagaaggactgttatgaaaaacagaagcacaaattttggtgaattgggatttgcagagatgaaaaagactgggtgacctggatctctgcttaatacatctacaaccattgtctcactggagactcacttgcatcagtttgtttaactgtgagtggctgcacaggcactgtgcaaacaatgaaaagccccttcacttctgcctgcacagcttacactgtcaggattcagttgcagattaaagaacccatctggaatggtttacagagagaggaatttaaaagaggacatcagaagagctggagatgcaagctctaggctgcgcttccaaaagcaaatgataattatgttaatgtcattagtgacaaagatttgcaacattagagaaaagagacacaaatataaaattaaaaacttaagtaccaactctccaaaactaaatttgaacttaaaatattagtataaactcataataaactctgccttt

SEQ ID NO: 9605 - DNA, 2797 bp, Homo sapiens
gtgcagtgtcctgactgtaagatcaagtccaaacctgttttggaattgaggaaacttctcttttgatctcagcccttggtggtccaggtcttcatgctgctgtgggtgatattactggtcctggctcctgtcagtggacagtttgcaaggacacccaggcccattattttcctccagcctccatggaccacagtcttccaaggagagagagtgaccctcacttgcaagggatttcgcttctactcaccacagaaaacaaaatggtaccatcggtaccttgggaaagaaatactaagagaaaccccagacaatatccttgaggttcaggaatctggagagtacagatgccaggcccagggctcccctctcagtagccctgtgcacttggatttttcttcagcttcgctgatcctgcaagctccactttctgtgtttgaaggagactctgtggttctgaggtgccgggcaaaggcggaagtaacactgaataatactatttacaagaatgataatgtcctggcattccttaataaaagaactgacttccatattcctcatgcatgtctcaaggacaatggtgcatatcgctgtactggatataaggaaagttgttgccctgtttcttccaatacagtcaaaatccaagtccaagagccatttacacgtccagtgctgagagccagctccttccagcccatcagcgggaacccagtgaccctgacctgtgagacccagctctctctagagaggtcagatgtcccgctccggttccgcttcttcagagatgaccagaccctgggattaggctggagtctctccccgaatttccagattactgccatgtggagtaaagattcagggttctactggtgtaaggcagcaacaatgcctcacagcgtcatatctgacagcccgagatcctggatacaggtgcagatccctgcatctcatcctgtcctcactctcagccctgaaaaggctctgaattttgagggaaccaaggtgacacttcactgtgaaacccaggaagattctctgcgcactttgtacaggttttatcatgagggtgtccccctgaggcacaagtcagtccgctgtgaaaggggagcatccatcagcttctcactgactacagagaattcagggaactactactgcacagctgacaatggccttggcgccaagcccagtaaggctgtgagcctctcagtcactgttcccgtgtctcatcctgtcctcaacctcagctctcctgaggacctgatttttgagggagccaaggtgacacttcactgtgaagcccagagaggttcactccccatcctgtaccagtttcatcatgaggatgctgccctggagcgtaggtcggccaactctgcaggaggagtggccatcagcttctctctgactgcagagcattcagggaactactactgcacagctgacaatggctttggcccccagcgcagtaaggcggtgagcctctccatcactgtccctgtgtctcatcctgtcctcaccctcagctctgctgaggccctgacttttgaaggagccactgtgacacttcactgtgaagtccagagaggttccccacaaatcctataccagttttatcatgaggacatgcccctgtggagcagctcaacaccctctgtgggaagagtgtccttcagcttctctctgactgaaggacattcagggaattactactgcacagctgacaatggctttggtccccagcgcagtgaagtggtgagcctttttgtcactgttccagtgtctcgccccatcctcaccctcagggttcccagggcccaggctgtggtgggggacctgctggagcttcactgtgaggccccgagaggctctcccccaatcctgtactggttttatcatgaggatgtcaccctggggagcagctcagccccctctggaggagaagcttctttcaacctctctctgactgcagaacattctggaaactactcatgtgaggccaacaatggcctagtggcccagcacagtgacacaatatcactcagtgttatagttccagtatctcgtcccatcctcaccttcagggctcccagggcccaggctgtggtgggggacctgctggagcttcactgtgaggccctgagaggctcctccccaatcctgtactggttttatcatgaagatgtcaccctgggtaagatctcagccccctctggaggaggggcctccttcaacctctctctgactacagaacattctggaatctactcctgtgaggcagacaatggtctggaggcccagcgcagtgagatggtgacactgaaagttgcaggtgagtgggccctgcccaccagcagcacatctgagaactgactgtgcctgttctccctgcagctgaaaatggagccacagagctcctcagggctgtttgcttgtgtggcatcccagcacacttcctgcctgcagaacctccctgtgaaagtctcggatcctttgtggtatggttccaggaatctgatgtttcccagcagtcttcttgaagatgatcaaagcacctcactaaaaatgcaaataagacttttttagaacataaactatattctgaactgaaattattacatgaaaatgaaaccaaagaattctgagcatatgtttctctgccgtagaaaggattaagctgtttcttgtccggattcttctctcattgacttctaagaagcctctactcttgagtctctttcattactggggatgtaaatgttccttacatttccacattaaaaatcctatgttaacg

SEQ ID NO: 9606 - DNA, 4422 bp, Homo sapiens
gtgcagtgtcctgactgtaagatcaagtccaaacctgttttggaattgaggaaacttctcttttgatctcagcccttggtggtccaggtcttcatgctgctgtgggtgatattactggtcctggctcctgtcagtggacagtttgcaaggacacccaggcccattattttcctccagcctccatggaccacagtcttccaaggagagagagtgaccctcacttgcaagggatttcgcttctactcaccacagaaaacaaaatggtaccatcggtaccttgggaaagaaatactaagagaaaccccagacaatatccttgaggttcaggaatctggagagtacagatgccaggcccagggctcccctctcagtagccctgtgcacttggatttttcttcagcttcgctgatcctgcaagctccactttctgtgtttgaaggagactctgtggttctgaggtgccgggcaaaggcggaagtaacactgaataatactatttacaagaatgataatgtcctggcattccttaataaaagaactgacttccatattcctcatgcatgtctcaaggacaatggtgcatatcgctgtactggatataaggaaagttgttgccctgtttcttccaatacagtcaaaatccaagtccaagagccatttacacgtccagtgctgagagccagctccttccagcccatcagcgggaacccagtgaccctgacctgtgagacccagctctctctagagaggtcagatgtcccgctccggttccgcttcttcagagatgaccagaccctgggattaggctggagtctctccccgaatttccagattactgccatgtggagtaaagattcagggttctactggtgtaaggcagcaacaatgcctcacagcgtcatatctgacagcccgagatcctggatacaggtgcagatccctgcatctcatcctgtcctcactctcagccctgaaaaggctctgaattttgagggaaccaaggtgacacttcactgtgaaacccaggaagattctctgcgcactttgtacaggttttatcatgagggtgtccccctgaggcacaagtcagtccgctgtgaaaggggagcatccatcagcttctcactgactacagagaattcagggaactactactgcacagctgacaatggccttggcgccaagcccagtaaggctgtgagcctctcagtcactgttcccgtgtctcatcctgtcctcaacctcagctctcctgaggacctgatttttgagggagccaaggtgacacttcactgtgaagcccagagaggttcactccccatcctgtaccagtttcatcatgaggatgctgccctggagcgtaggtcggccaactctgcaggaggagtggccatcagcttctctctgactgcagagcattcagggaactactactgcacagctgacaatggctttggcccccagcgcagtaaggcggtgagcctctccatcactgtccctgtgtctcatcctgtcctcaccctcagctctgctgaggccctgacttttgaaggagccactgtgacacttcactgtgaagtccagagaggttccccacaaatcctataccagttttatcatgaggacatgcccctgtggagcagctcaacaccctctgtgggaagagtgtccttcagcttctctctgactgaaggacattcagggaattactactgcacagctgacaatggctttggtccccagcgcagtgaagtggtgagcctttttgtcactggtaagtgctgggttcttgccagtcacccacccctggctgagttctctctcacccattcctttaaaaatctgtttgcactgtccagtttcctcccctaatcaacttaatccccttcttggcttcctcctcaactaactagctggggttttccgtactcataagtcctggctcagccagacccctaaaacagctcagtagattccccagcttttaccaaatgaatttatttattgtattttctcctcattccttgtatgttccaacagtacgccaatttttcttgatgcacggagcgtgtcctacttctctactgacatttacatattaacttagctacaagcacagtcttatagataaatattggtcaagaccttaaattctccaaaggatttccaatcttatggtagatttggagaaagctgctggtgaacaaagggggaaatggctccctaggaaccaactcctcaaacttctggagtttttatgatcccttgttttctaacctgctaaaatcagtatcattttattgtattattttaaaaaaactattgttgaagtatgacatacattcaagaaacgtgtgcaaattgtatgtgtacgatttggtgtctttttaggagctaagttgcttctgtttttacttgaatctttgtttatagaaactgggggaaagtttactttcttttcagagaagccaaatggtatgatagaaaaatcttgagcctgatgtgtcagacatgcccctagcataacttgttgagtaaagaggttatttttaaaatgtgaatgttctgagactactccaaagtcagagccaaatctactaggaagcttctagacttcactcattctgcatcccattactatctttttatccatgttttactttcttctcatattcagcagcatcttaagcctctttattttctgtttcttgactgtcacccttaatgccagtagaatgtaagcttcatgagaacagaactgcatccatcttggtcttcacaacatccctgtgcctactcagtgtttggcacacagtaggtcctcagtcaacatttgtaatttagtggacagatgatatgacaagatgataagaggggatttaaaaaaatcatctagcaaagcccaagaggaaaaaaaacaaagctattttagaaatgaaataccaatttgaagcagtaagaatagattggatatctttgaaaaccattaattgaatgaagaaccaatttgagaaaacaatacagaatgcaaagtagaaagatacagaaataaaggcaaaagttataatatggaaatcagacaatggatttgtctgtatccagttatgtggataattaaaatggagaccctcagaaaattgaaccgaagagtaaaatgaaactcaaaaatgtagtagaaattgttgggaagtaaagaaaacttgaatatgtagatcagaacatatatgttgatgacgttattgactttgaggttaaaaatatatatatgtgcctatgattatggggaaaaaagcagtcgtctcagaaagaaaaacatcaagttagtcttagactttgcagtgcactcagtaccaaagagagaggaggccagacttggacctgcgagggaagaataataaccgaaaattttatatcaattcaaaaagacattgtcaaaaatacagggattcaggaaactgagaatgcactaagccttctggaaaaaacacctaatgacaaaatctagcccaacaagatgtaaatgaatataaaggactcataatgaggaaaccgcattatgactggctctcaaccctggccgcatattagactcgtcaaagacctttgtaaaaggtcacacattgactcgtcaaagcccctctccagactaattcaattcagaatctcacagatggggccacagaatcagtattttttgacacaacctcaagtgagaatattgtgtagacaagattggaaaccactgatttagatatagaaacaaaggctaatcaactgtgagaattatggtcacagaatagaaagtaactattatgaacactgaaaatgtaaaaaaaatgtaacaaagaaaaatagttagaggaaggagaggaagtaaaggaacaatcattttctcatgattattattatttcagagtaaattgtgagttatttcacaattcaaaaagaatggactgttttaaaaaattagtaatagatttcaaaatgtccattttgtaaatcgtttctgaatactttgtcaacagttactcatcattaatggcttatacttcactaaaattccatggaaaaccaactagtagcctgtagagtcacataggagagaacaagtgaattctttgggtggcgcaagcatagatgttaggactgacaaaaaaaaataataaaaataaacctgtgcattgatatgatcacaaatgatcagggaaagaggaaacagaaactctcatacgccattattacaagtgtaaattggttcaaccttttcgtcttaattgacacattgtaattgtatatatttatggaagcacagtttgatattttgatatacatacatggtatataacgatcaaattaggatatttaatgtacccatcatctcatgcatttatcatttctttggaataaaaacattcaaaagcc

SEQ ID NO: 9607 - DNA, 5321 bp, Homo sapiens
gtgcagtgtcctgactgtaagatcaagtccaaacctgttttggaattgaggaaacttctcttttgatctcagcccttggtggtccaggtcttcatgctgctgtgggtgatattactggtcctggctcctgtcagtggacagtttgcaaggacacccaggcccattattttcctccagcctccatggaccacagtcttccaaggagagagagtgaccctcacttgcaagggatttcgcttctactcaccacagaaaacaaaatggtaccatcggtaccttgggaaagaaatactaagagaaaccccagacaatatccttgaggttcaggaatctggagagtacagatgccaggcccagggctcccctctcagtagccctgtgcacttggatttttcttcagcttcgctgatcctgcaagctccactttctgtgtttgaaggagactctgtggttctgaggtgccgggcaaaggcggaagtaacactgaataatactatttacaagaatgataatgtcctggcattccttaataaaagaactgacttccatattcctcatgcatgtctcaaggacaatggtgcatatcgctgtactggatataaggaaagttgttgccctgtttcttccaatacagtcaaaatccaagtccaagagccatttacacgtccagtgctgagagccagctccttccagcccatcagcgggaacccagtgaccctgacctgtgagacccagctctctctagagaggtcagatgtcccgctccggttccgcttcttcagagatgaccagaccctgggattaggctggagtctctccccgaatttccagattactgccatgtggagtaaagattcagggttctactggtgtaaggcagcaacaatgcctcacagcgtcatatctgacagcccgagatcctggatacaggtgcagatccctgcatctcatcctgtcctcactctcagccctgaaaaggctctgaattttgagggaaccaaggtgacacttcactgtgaaacccaggaagattctctgcgcactttgtacaggttttatcatgagggtgtccccctgaggcacaagtcagtccgctgtgaaaggggagcatccatcagcttctcactgactacagagaattcagggaactactactgcacagctgacaatggccttggcgccaagcccagtaaggctgtgagcctctcagtcactgttcccgtgtctcatcctgtcctcaacctcagctctcctgaggacctgatttttgagggagccaaggtgacacttcactgtgaagcccagagaggttcactccccatcctgtaccagtttcatcatgaggatgctgccctggagcgtaggtcggccaactctgcaggaggagtggccatcagcttctctctgactgcagagcattcagggaactactactgcacagctgacaatggctttggcccccagcgcagtaaggcggtgagcctctccatcactgtccctgtgtctcatcctgtcctcaccctcagctctgctgaggccctgacttttgaaggagccactgtgacacttcactgtgaagtccagagaggttccccacaaatcctataccagttttatcatgaggacatgcccctgtggagcagctcaacaccctctgtgggaagagtgtccttcagcttctctctgactgaaggacattcagggaattactactgcacagctgacaatggctttggtccccagcgcagtgaagtggtgagcctttttgtcactgttccagtgtctcgccccatcctcaccctcagggttcccagggcccaggctgtggtgggggacctgctggagcttcactgtgaggccccgagaggctctcccccaatcctgtactggttttatcatgaggatgtcaccctggggagcagctcagccccctctggaggagaagcttctttcaacctctctctgactgcagaacattctggaaactactcatgtgaggccaacaatggcctagtggcccagcacagtgacacaatatcactcagtgttatagttccagtatctcgtcccatcctcaccttcagggctcccagggcccaggctgtggtgggggacctgctggagcttcactgtgaggccctgagaggctcctccccaatcctgtactggttttatcatgaagatgtcaccctgggtaagatctcagccccctctggaggaggggcctccttcaacctctctctgactacagaacattctggaatctactcctgtgaggcagacaatggtctggaggcccagcgcagtgagatggtgacactgaaagttgcagttccggtgtctcgcccggtcctcaccctcagggctcccgggacccatgctgcggtgggggacctgctggagcttcactgtgaggccctgagaggctctcccctgatcctgtaccggttttttcatgaggatgtcaccctaggaaataggtcgtccccctctggaggagcgtccttaaacctctctctgactgcagagcactctggaaactactcctgtgaggccgacaatggcctcggggcccagcgcagtgagacagtgacactttatatcacagggctgaccgcgaacagaagtggcccttttgccacaggagtcgccgggggcctgctcagcatagcaggccttgctgcgggggcactgctgctctactgctggctctcgagaaaagcagggagaaagcctgcctctgaccccgccaggagcccttcagactcggactcccaagagcccacctatcacaatgtaccagcctgggaagagctgcaaccagtgtacactaatgcaaatcctagaggagaaaatgtggtttactcagaagtacggatcatccaagagaaaaagaaacatgcagtggcctctgaccccaggcatctcaggaacaagggttcccctatcatctactctgaagttaaggtggcgtcaaccccggtttccggatccctgttcttggcttcctcagctcctcacagatgagtccacacgtctctccaactgctgtttcagcctctgcaccccaaagttccccttgggggagaagcagcattgaagtgggaagatttaggctgccccagaccatatctactggcctttgtttcacatgtcctcattctcagtctgaccagaatgcagggccctgctggactgtcacctgtttcccagttaaagccctgactggcaggttttttaatccagtggcaaggtgctcccactccagggcccagcacatctcctggattccttagtgggcttcagctgtggttgctgttctgagtactgctctcatcacacccccacagagggggtcttaccacacaaagggagagtgggccttcaggagatgccgggctggcctaacagctcaggtgctcctaaactccgacacagagttcctgctttgggtggatgcatttctcaattgtcatcagcctggtggggctactgcagtgtgctgccaaatgggacagcacacagcctgtgcacatgggacatgtgatgggtctccccacgggggctgcatttcacactcctccacctgtctcaaactctaaggtcggcacttgacaccaaggtaacttctctcctgctcatgtgtcagtgtctacctgcccaagtaagtggctttcatacaccaagtcccgaagttcttcccatcctaacagaagtaacccagcaagtcaaggccaggaggaccaggggtgcagacagaacacatactggaacacaggaggtgctcaattactatttgactgactgactgaatgaatgaatgaatgaggaagaaaactgtgggtaatcaaactggcataaaatccagtgcactccctaggaaatccgggaggtattctggcttcctaagaaacaacggaagagaaggagcttggatgaagaaactgttcagcaagaagaagggcttcttcacacttttatgtgcttgtggatcacctgaggatctgtgaaaatacagatactgattcagtgggtctgtgtagagcctgagactgccattctaacatgttcccaggggatgctgatgctgctggccctgggactgcactgcatgcatgtgaagccctataggtctcagcagaggcccatggagagggaatgtgtggctctggctgcccagggcccaactcggttcacacggatcgtgctgctccctggccagcctttggccacagcaccaccagctgctgttgctgagagagcttcttctctgtgacatgttggctttcatcagccaccctgggaagcggaaagtagctgccactatctttgtttccccacctcaggcctcacactttcccatgaaaagggtgaatgtatataacctgagccctctccattcagagttgttctcccatctctgagcaatgggatgttctgttccgcttttatgatatccatcacatcttatcttgatctttgctcccagtggattgtacagtgatgacttttaagccccacggccctgaaataaaatccttccaagggcattggaagctcactccacctgaaccatggcttttcatgcttccaagtgtcagggccttgcccagatagacagggctgactctgctgccccaacctttcaaggaggaaaccagacacctgagacaggagcctgtatgcagcccagtgcagccttgcagaggacaaggctggaggcatttgtcatcactacagatatgcaactaaaatagacgtggagcaagagaaatgcattcccaccgaggccgcttttttaggcctagttgaaagtcaagaaggacagcagcaagcataggctcaggattaaagaaaaaaatctgctcacagtctgttctggaggtcacatcaccaacaaagctcacgccctatgcagttctgagaaggtggaggcaccaggctcaaaagaggaaatttagaatttctcattgggagagtaaggtacccccatcccagaatgataactgcacagtggcagaacaaactccaccctaatgtgggtggaccccatccagtctgttgaaggcctgaatgtaacaaaagggcttattcttcctcaagtaagggggaactcctgctttgggctgggacataagtttttctgctttcagacgcaaactgaaaaatggctcttcttgggtcttgagcttgctggcatatggactgaaagaaactatgctattggatctcctggatctccagcttgctgactgcagatcttgagatatgtcagcctctacagtcacaagagctaattcattctaataaaccaatctttc

SEQ ID NO: 9608 - DNA, 2970 bp, Homo sapiens
agtgaaggggtttcccatatgaaaaatacagaaagaattatttgaatactagcaaatacacaacttgatatttctagagaacccaggcacagtcttggagacattactcctgagagactgcagctgatggaagatgagccccaacttctaaaaatgtatcactaccgggattgagatacaaacagcatttaggaaggtctcatctgagtagcagcttcctgccctccttcttggagataagtcgggcttttggtgagacagactttcccaaccctctgcccggccggtgcccatgcttctgtggctgctgctgctgatcctgactcctggaagagaacaatcaggggtggccccaaaagctgtacttctcctcaatcctccatggtccacagccttcaaaggagaaaaagtggctctcatatgcagcagcatatcacattccctagcccagggagacacatattggtatcacgatgagaagttgttgaaaataaaacatgacaagatccaaattacagagcctggaaattaccaatgtaagacccgaggatcctccctcagtgatgccgtgcatgtggaattttcacctgactggctgatcctgcaggctttacatcctgtctttgaaggagacaatgtcattctgagatgtcaggggaaagacaacaaaaacactcatcaaaaggtttactacaaggatggaaaacagcttcctaatagttataatttagagaagatcacagtgaattcagtctccagggataatagcaaatatcattgtactgcttataggaagttttacatacttgacattgaagtaacttcaaaacccctaaatatccaagttcaagagctgtttctacatcctgtgctgagagccagctcttccacgcccatagaggggagtcccatgaccctgacctgtgagacccagctctctccacagaggccagatgtccagctgcaattctccctcttcagagatagccagaccctcggattgggctggagcaggtcccccagactccagatccctgccatgtggactgaagactcagggtcttactggtgtgaggtggagacagtgactcacagcatcaaaaaaaggagcctgagatctcagatacgtgtacagagagtccctgtgtctaatgtgaatctagagatccggcccaccggagggcagctgattgaaggagaaaatatggtccttatttgctcagtagcccagggttcagggactgtcacattctcctggcacaaagaaggaagagtaagaagcctgggtagaaagacccagcgttccctgttggcagagctgcatgttctcaccgtgaaggagagtgatgcagggagatactactgtgcagctgataacgttcacagccccatcctcagcacgtggattcgagtcaccgtgagaattccggtatctcaccctgtcctcaccttcagggctcccagggcccacactgtggtgggggacctgctggagcttcactgtgagtccctgagaggctctcccccgatcctgtaccgattttatcatgaggatgtcaccctggggaacagctcagccccctctggaggaggagcctccttcaacctctctctgactgcagaacattctggaaactactcctgtgatgcagacaatggcctgggggcccagcacagtcatggagtgagtctcagggtcacagttccggtgtctcgccccgtcctcaccctcagggctcccggggcccaggctgtggtgggggacctgctggagcttcactgtgagtccctgagaggctccttcccgatcctgtactggttttatcacgaggatgacaccttggggaacatctcggcccactctggaggaggggcatccttcaacctctctctgactacagaacattctggaaactactcatgtgaggctgacaatggcctgggggcccagcacagtaaagtggtgacactcaatgttacaggaacttccaggaacagaacaggccttaccgctgcgggaatcacggggctggtgctcagcatcctcgtccttgctgctgctgctgctctgctgcattacgccagggcccgaaggaaaccaggaggactttctgccactggaacatctagtcacagtcctagtgagtgtcaggagccttcctcgtccaggccttccaggatagaccctcaagagcccactcactctaaaccactagccccaatggagctggagccaatgtacagcaatgtaaatcctggagatagcaacccgatttattcccagatctggagcatccagcatacaaaagaaaactcagctaattgtccaatgatgcatcaagagcatgaggaacttacagtcctctattcagaactgaagaagacacacccagacgactctgcaggggaggctagcagcagaggcagggcccatgaagaagatgatgaagaaaactatgagaatgtaccacgtgtattactggcctcagaccactagccccttacccagagtggcccacaggaaacagcctgcaccatttttttttctgttctctccaaccacacatcatccatctctccagactctgcctcctacgaggctgggctgcagggtatgtgaggctgagcaaaaggtctgcaaatctcccctgtgcctgatctgtgtgttccccaggaagagagcaggcagcctctgagcaagcactgtgttattttcacagtggagacacgtggcaaggcaggagggccctcagctcctagggctgtcgaatagaggaggagagagaaatggtctagccagggttacaagggcacaatcatgaccatttgatccaagtgtgatcgaaagctgttaatgtgctctctgtataaacaatttgctccaaatattttgtttcccttttttgtgtggctggtagtggcattgctgatgttttggtgtatatgctgtatccttgctaccatattggg

SEQ ID NO: 9609 - DNA, 2580 bp, Homo sapiens
tggtgaccaagagtacatctcttttcaaatagctggattaggtcctcatgctgctgtggtcattgctggtcatctttgatgcagtcactgaacaggcagattcgctgacccttgtggcgccctcttctgtcttcgaaggagacagcatcgttctgaaatgccagggagaacagaactggaaaattcagaagatggcttaccataaggataacaaagagttatctgttttcaaaaaattctcagatttccttatccaaagtgcagttttaagtgacagtggtaactatttctgtagtaccaaaggacaactctttctctgggataaaacttcaaatatagtaaagataaaagtccaagagctctttcaacgtcctgtgctgactgccagctccttccagcccatcgaagggggtccagtgagcctgaaatgtgagacccggctctctccacagaggttggatgttcaactccagttctgcttcttcagagaaaaccaggtcctggggtcaggctggagcagctctccggagctccagatttctgccgtgtggagtgaagacacagggtcttactggtgcaaggcagaaacggtgactcacaggatcagaaaacagagcctccaatcccagattcacgtgcagagaatccccatctctaatgtaagcttggagatccgggcccccgggggacaggtgactgaaggacaaaaactgatcctgctctgctcagtggctgggggtacaggaaatgtcacattctcctggtacagagaggccacaggaaccagtatgggaaagaaaacccagcgttccctgtcagcagagctggagatcccagctgtgaaagagagtgatgccggcaaatattactgtagagctgacaacggccatgtgcctatccagagcaaggtggtgaatatccctgtgagaattccagtgtctcgccctgtcctcaccctcaggtctcctggggcccaggctgcagtgggggacctgctggagcttcactgtgaggccctgagaggctctcccccaatcttgtaccaattttatcatgaggatgtcacccttgggaacagctcggccccctctggaggaggggcctccttcaacctctctttgactgcagaacattctggaaactactcctgtgaggccaacaacggcctgggggcccagtgcagtgaggcagtgccagtctccatctcaggacctgatggctatagaagagacctcatgacagctggagttctctggggactgtttggtgtccttggtttcactggtgttgctttgctgttgtatgccttgttccacaagatatcaggagaaagttctgccactaatgaacccagaggggcttccaggccaaatcctcaagagttcacctattcaagcccaaccccagacatggaggagctgcagccagtgtatgtcaatgtgggctctgtagatgtggatgtggtttattctcaggtctggagcatgcagcagccagaaagctcagcaaacatcaggacacttctggagaacaaggactcccaagtcatctactcttctgtgaagaaatcataacacttggaggaatcagaagggaagatcaacagcaaggatggggcatcattaagacttgctataaaaccttatgaaaatgcttgaggcttatcacctgccacagccagaacgtgcctcaggaggcacctcctgtcatttttgtcctgatgatgtttcttctccaatatcttcttttacctatcaatattcattgaactgctgctacatccagacactgtgcaaataaattatttctgctaccttctcttaagcaatcagtgtgtaaagatttgagggaagaatgaataagagatacaaggtctcaccttcatctactgtgaagtgatgagaacaggacttgatagtggtgtattaacttatttatgtgctgctggatacagtttgctaatattttgttgagaatttttgcaaatatgttcattgggaatattggcctgaaattttcttttccactgtgtctctgccagaatgtttgtatcaggctgatgctggcttcatagaatgagttaggcaggagcccttcctccttgattttttggcatagtttcagcaggattggtaccagttattctttctgcatcttgtagaattcagctatgaatccatctggtctagggcttttgtgttggttggtaagttttttattactaattcaacttcagcgcttgatattggtctaggaggggtttctgtctcttcctggttcaatcttgggagattgtgtgtttccaggaatttagccgtttcctccagattttcttctttatgtgcatcgacttgagtgtaaacataacttatatgcactgggaaaccaaaaaatctgtgtgacttgctttattgcagcatttgttttattttggtagtctggaactgaacctgcaatatcaccaaagtatgcatatagttgcaaaaatgtgatttttgacatagtaaatatgagtatttgcaataaactatgatattacttttgtaagtatatagaataaaatgtaaataatctataaaa

SEQ ID NO: 9610 - DNA, 2303 bp, Homo sapiens
gaggcatctctaggtaccatccctgacctggtcctcatgctgccgaggctgttgctgttgatctgtgctccactctgtgaacctgccgagctgtttttgatagccagcccctcccatcccacagaggggagcccagtgaccctgacgtgtaagatgccctttctacagagttcagatgcccagttccagttctgctttttcagagacacccgggccttgggcccaggctggagcagctcccccaagctccagatcgctgccatgtggaaagaagacacagggtcatactggtgcgaggcacagacaatggcgtccaaagtcttgaggagcaggagatcccagataaatgtgcacagggtccctgtcgctgatgtgagcttggagactcagcccccaggaggacaggtgatggagggagacaggctggtcctcatctgctcagttgctatgggcacaggagacatcaccttcctttggtacaaaggggctgtaggtttaaaccttcagtcaaagacccagcgttcactgacagcagagtatgagattccttcagtgagggagagtgatgctgagcaatattactgtgtagctgaaaatggctatggtcccagccccagtgggctggtgagcatcactgtcagaatcccggtgtctcgcccaatcctcatgctcagggctcccagggcccaggctgcagtggaggatgtgctggagcttcactgtgaggccctgagaggctctcctccaatcctgtactggttttatcacgaggatatcaccctggggagcaggtcggccccctctggaggaggagcctccttcaacctttccctgactgaagaacattctggaaactactcctgtgaggccaacaatggcctgggggcccagcgcagtgaggcggtgacactcaacttcacagtgcctactggggccagaagcaatcatcttacctcaggagtcattgaggggctgctcagcacccttggtccagccaccgtggccttattattttgctacggcctcaaaagaaaaataggaagacgttcagccagggatccactcaggagccttcccagccctctaccccaagagttcacctacctcaactcacctaccccagggcagctacagcctatatatgaaaatgtgaatgttgtaagtggggatgaggtttattcactggcgtactataaccagccggagcaggaatcagtagcagcagaaaccctggggacacatatggaggacaaggtttccttagacatctattccaggctgaggaaagcaaacattacagatgtggactatgaagatgctatgtaaggttatggaagattctgctctttgaaaaccatccatgaccccaagcctcaggcctgatatgttcttcagagatcctggggcattagctttccagtatacctcttctggatgccattctccatggcactattccttcatctactgtgaagtgaagttggcgcagccctgaagaaactacctaggagaactaatagacacaggagtgacagggactttgttatcagaaccagattcctgccggctcctttgaaaacaggtcatattgtgctcttctgtttacaagaggaaacaagatggaataaaagaaattgggatcttgggttggagggacagtgaagcttagagcacatgaactcaaggttagtgactctgcaggacttcacagagagagctgtgcccatcattcagtccaagtgctttctctgcccagacagcacagaactccagccccgctacttacatggatcatcgagtttccacctaaaatatgattctatttattttgagtcactgttaccaaattagaactaaaacaaagttacataaaaagttattgtgactccacttaattttagtgacgtatttttgtatatataggccaacctataccacatccaaaattatgtatctattacagcccctagaagctttataaatacagtgtgtcttcttttattcacaaaatttttgaaatcgtggtaatatggtttgaaacctgtatcttaattattttttttttaaattgagacagggtctcactctgtcactcaatctggaatgcagtggcacaatcttgcctcactgcaacgcctgcctctcaggctcaagcaaacctctcacctcagcctgctgagtagctgggactacaggcacatgccaccaaacttggccattttttgtcttacgtagagacaagatttcaccgttttgcccaggctggtctcaaactcctgggctcaagcaatgtattgaatttt

SEQ ID NO: 9611 - protein, 261 aa, Homo sapiens
MGKKTQRSLSAELEIPAVKESDAGKYYCRADNGHVPIQSKVVNIPVRIPVSRPVLTLRSPGAQAAVGDLLELHCEALRGSPPILYQFYHEDVTLGNSSAPSGGGASFNLSLTAEHSGNYSCEANNGLGAQCSEAVPVSISGPDGYRRDLMTAGVLWGLFGVLGFTGVALLLYALFHKISGESSATNEPRGASRPNPQEFTYSSPTPDMEELQPVYVNVGSVDVDVVYSQVWSMQQPESSANIRTLLENKDSQVIYSSVKKS

SEQ ID NO: 9612 - protein, 255 aa, Homo sapiens
MWEWKICNSHGARPFAEPAGWEFVNLLRHHKSFLIAPLCLSVPVSRPVLTLRSPGAQAAVGDLLELHCEALRGSPPILYQFYHEDVTLGNSSAPSGGGASFNLSLTAEHSGNYSCEANNGLGAQCSEAVPVSISGPDGYRRDLMTAGVLWGLFGVLGFTGVALLLYALFHKISGESSATNEPRGASRPNPQEFTYSSPTPDMEELQPVYVNVGSVDVDVVYSQVWSMQQPESSANIRTLLENKDSQVIYSSVKKS

SEQ ID NO: 9613 - protein, 34 aa, Homo sapiens
MGKKTQRSLSAELEIPAVKESDAGKYYCRADGCG

SEQ ID NO: 9614 - protein, 34 aa, Homo sapiens
NGHVPIQSKVVNIPVRIPVSRPVLTLRSPGAGCG

SEQ ID NO: 9615 - protein, 34 aa, Homo sapiens
QAAVGDLLELHCEALRGSPPILYQFYHEDVTGCG

SEQ ID NO: 9616 - protein, 34 aa, Homo sapiens
LGNSSAPSGGGASFNLSLTAEHSGNYSCEANGCG

SEQ ID NO: 9617 - protein, 35 aa, Homo sapiens
NGLGAQCSEAVPVSISGPDGYRRDLMTAGVLWGCG

SEQ ID NO: 9618 - protein, 9 aa, Homo sapiens
GVLWGLFGV

SEQ ID NO: 9619 - protein, 9 aa, Homo sapiens
LLYALFHKI

SEQ ID NO: 9620 - protein, 9 aa, Homo sapiens
GLFGVLGFT

SEQ ID NO: 9621 - protein, 9 aa, Homo sapiens
VVYSQVWSM

SEQ ID NO: 9622 - protein, 9 aa, Homo sapiens
VLGFTGVAL

SEQ ID NO: 9623 - protein, 9 aa, Homo sapiens
VLWGLFGVL

SEQ ID NO: 9624 - protein, 9 aa, Homo sapiens
YVNVGSVDV

SEQ ID NO: 9625 - protein, 9 aa, Homo sapiens
MTAGVLWGL

SEQ ID NO: 9626 - protein, 9 aa, Homo sapiens
VLTLRSPGA

SEQ ID NO: 9627 - protein, 9 aa, Homo sapiens
ELQPVYVNV

SEQ ID NO: 9628 - protein, 9 aa, Homo sapiens
LLENKDSQV

SEQ ID NO: 9629 - protein, 9 aa, Homo sapiens
AQCSEAVPV

SEQ ID NO: 9630 - protein, 9 aa, Homo sapiens
NVGSVDVDV

SEQ ID NO: 9631 - protein, 9 aa, Homo sapiens
DLLELHCEA

SEQ ID NO: 9632 - protein, 9 aa, Homo sapiens
GLGAQCSEA

SEQ ID NO: 9633 - protein, 9 aa, Homo sapiens
QQPESSANI

SEQ ID NO: 9634 - protein, 9 aa, Homo sapiens
GVALLLYAL

SEQ ID NO: 9635 - protein, 9 aa, Homo sapiens
FGVLGFTGV

SEQ ID NO: 9636 - protein, 9 aa, Homo sapiens
SMQQPESSA

SEQ ID NO: 9637 - protein, 9 aa, Homo sapiens
KISGESSAT

SEQ ID NO: 9638 - protein, 9 aa, Homo sapiens
VLWGLFGVL

SEQ ID NO: 9639 - protein, 9 aa, Homo sapiens
GVLWGLFGV

SEQ ID NO: 9640 - protein, 9 aa, Homo sapiens
GVALLLYAL

SEQ ID NO: 9641 - protein, 9 aa, Homo sapiens
VVYSQVWSM

SEQ ID NO: 9642 - protein, 9 aa, Homo sapiens
YVNVGSVDV

SEQ ID NO: 9643 - protein, 9 aa, Homo sapiens
VLGFTGVAL

SEQ ID NO: 9644 - protein, 9 aa, Homo sapiens
LLYALFHKI

SEQ ID NO: 9645 - protein, 9 aa, Homo sapiens
RIPVSRPVL

SEQ ID NO: 9646 - protein, 9 aa, Homo sapiens
GLFGVLGFT

SEQ ID NO: 9647 - protein, 9 aa, Homo sapiens
KVVNIPVRI

SEQ ID NO: 9648 - protein, 9 aa, Homo sapiens
GVLGFTGVA

SEQ ID NO: 9649 - protein, 9 aa, Homo sapiens
NVGSVDVDV

SEQ ID NO: 9650 - protein, 9 aa, Homo sapiens
HVPIQSKVV

SEQ ID NO: 9651 - protein, 9 aa, Homo sapiens
YQFYHEDVT

SEQ ID NO: 9652 - protein, 9 aa, Homo sapiens
LGFTGVALL

SEQ ID NO: 9653 - protein, 9 aa, Homo sapiens
YSCEANNGL

SEQ ID NO: 9654 - protein, 9 aa, Homo sapiens
KISGESSAT

SEQ ID NO: 9655 - protein, 9 aa, Homo sapiens
MTAGVLWGL

SEQ ID NO: 9656 - protein, 9 aa, Homo sapiens
PVSRPVLTL

SEQ ID NO: 9657 - protein, 9 aa, Homo sapiens
AQAAVGDLL

SEQ ID NO: 9658 - protein, 9 aa, Homo sapiens
GFTGVALLL

SEQ ID NO: 9659 - protein, 9 aa, Homo sapiens
TYSSPTPDM

SEQ ID NO: 9660 - protein, 9 aa, Homo sapiens
QFYHEDVTL

SEQ ID NO: 9661 - protein, 9 aa, Homo sapiens
RIPVSRPVL

SEQ ID NO: 9662 - protein, 9 aa, Homo sapiens
LYQFYHEDV

SEQ ID NO: 9663 - protein, 9 aa, Homo sapiens
AAVGDLLEL

SEQ ID NO: 9664 - protein, 9 aa, Homo sapiens
LLELHCEAL

SEQ ID NO: 9665 - protein, 9 aa, Homo sapiens
GAQAAVGDL

SEQ ID NO: 9666 - protein, 9 aa, Homo sapiens
YSCEANNGL

SEQ ID NO: 9667 - protein, 9 aa, Homo sapiens
VLWGLFGVL

SEQ ID NO: 9668 - protein, 9 aa, Homo sapiens
MTAGVLWGL

SEQ ID NO: 9669 - protein, 9 aa, Homo sapiens
AQAAVGDLL

SEQ ID NO: 9670 - protein, 9 aa, Homo sapiens
SSANIRTLL

SEQ ID NO: 9671 - protein, 9 aa, Homo sapiens
TQRSLSAEL

SEQ ID NO: 9672 - protein, 9 aa, Homo sapiens
SPTPDMEEL

SEQ ID NO: 9673 - protein, 9 aa, Homo sapiens
GSPPILYQF

SEQ ID NO: 9674 - protein, 9 aa, Homo sapiens
LYALFHKIS

SEQ ID NO: 9675 - protein, 9 aa, Homo sapiens
GYRRDLMTA

SEQ ID NO: 9676 - protein, 9 aa, Homo sapiens
GVALLLYAL

SEQ ID NO: 9677 - protein, 9 aa, Homo sapiens
KVVNIPVRI

SEQ ID NO: 9678 - protein, 9 aa, Homo sapiens
LLLYALFHK

SEQ ID NO: 9679 - protein, 9 aa, Homo sapiens
LLYALFHKI

SEQ ID NO: 9680 - protein, 9 aa, Homo sapiens
VLWGLFGVL

SEQ ID NO: 9681 - protein, 9 aa, Homo sapiens
NIRTLLENK

SEQ ID NO: 9682 - protein, 9 aa, Homo sapiens
QVIYSSVKK

SEQ ID NO: 9683 - protein, 9 aa, Homo sapiens
AVKESDAGK

SEQ ID NO: 9684 - protein, 9 aa, Homo sapiens
SQVIYSSVK

SEQ ID NO: 9685 - protein, 9 aa, Homo sapiens
DMEELQPVY

SEQ ID NO: 9686 - protein, 9 aa, Homo sapiens
ALLLYALFH

SEQ ID NO: 9687 - protein, 9 aa, Homo sapiens
GLFGVLGFT

SEQ ID NO: 9688 - protein, 9 aa, Homo sapiens
ALRGSPPIL

SEQ ID NO: 9689 - protein, 9 aa, Homo sapiens
VVYSQVWSM

SEQ ID NO: 9690 - protein, 9 aa, Homo sapiens
GVALLLYAL

SEQ ID NO: 9691 - protein, 9 aa, Homo sapiens
FTGVALLLY

SEQ ID NO: 9692 - protein, 9 aa, Homo sapiens
GLGAQCSEA

SEQ ID NO: 9693 - protein, 9 aa, Homo sapiens
VLGFTGVAI

SEQ ID NO: 9694 - protein, 9 aa, Homo sapiens
LLELHCEAL

SEQ ID NO: 9695 - protein, 9 aa, Homo sapiens
KVVNIPVRI

SEQ ID NO: 9696 - protein, 9 aa, Homo sapiens
GVLWGLFGV

SEQ ID NO: 9697 - protein, 9 aa, Homo sapiens
MTAGVLWGL

SEQ ID NO: 9698 - protein, 9 aa, Homo sapiens
QVIYSSVKK

SEQ ID NO: 9699 - protein, 9 aa, Homo sapiens
AVKESDAGK

SEQ ID NO: 9700 - protein, 9 aa, Homo sapiens
ISGPDGYRR

SEQ ID NO: 9701 - protein, 9 aa, Homo sapiens
ESSATNEPR

SEQ ID NO: 9702 - protein, 9 aa, Homo sapiens
VSRPVLTLR

SEQ ID NO: 9703 - protein, 9 aa, Homo sapiens
DVTLGNSSA

SEQ ID NO: 9704 - protein, 9 aa, Homo sapiens
NVGSVDVDV

SEQ ID NO: 9705 - protein, 9 aa, Homo sapiens
DVDVVYSQV

SEQ ID NO: 9706 - protein, 9 aa, Homo sapiens
IPVRIPVSR

SEQ ID NO: 9707 - protein, 9 aa, Homo sapiens
LLLYALFHK

SEQ ID NO: 9708 - protein, 9 aa, Homo sapiens
GVLWGLFGV

SEQ ID NO: 9709 - protein, 9 aa, Homo sapiens
GVALLLYAL

SEQ ID NO: 9710 - protein, 9 aa, Homo sapiens
KVVNIPVRI

SEQ ID NO: 9711 - protein, 9 aa, Homo sapiens
AVGDLLELH

SEQ ID NO: 9712 - protein, 9 aa, Homo sapiens
GVLGFTGVA

SEQ ID NO: 9713 - protein, 9 aa, Homo sapiens
SISGPDGYR

SEQ ID NO: 9714 - protein, 9 aa, Homo sapiens
SQVIYSSVK

SEQ ID NO: 9715 - protein, 9 aa, Homo sapiens
QPESSANIR

SEQ ID NO: 9716 - protein, 9 aa, Homo sapiens
LELHCEALR

SEQ ID NO: 9717 - protein, 9 aa, Homo sapiens
HVPIQSKVV

SEQ ID NO: 9718 - protein, 9 aa, Homo sapiens
QVIYSSVKK

SEQ ID NO: 9719 - protein, 9 aa, Homo sapiens
AVKESDAGK

SEQ ID NO: 9720 - protein, 9 aa, Homo sapiens
LLLYALFHK

SEQ ID NO: 9721 - protein, 9 aa, Homo sapiens
SQVIYSSVK

SEQ ID NO: 9722 - protein, 9 aa, Homo sapiens
NIRTLLENK

SEQ ID NO: 9723 - protein, 9 aa, Homo sapiens
GVLWGLFGV

SEQ ID NO: 9724 - protein, 9 aa, Homo sapiens
GVALLLYAL

SEQ ID NO: 9725 - protein, 9 aa, Homo sapiens
KVVNIPVRI

SEQ ID NO: 9726 - protein, 9 aa, Homo sapiens
GVLGFTGVA

SEQ ID NO: 9727 - protein, 9 aa, Homo sapiens
AELEIPAVK

SEQ ID NO: 9728 - protein, 9 aa, Homo sapiens
SISGPDGYR

SEQ ID NO: 9729 - protein, 9 aa, Homo sapiens
VVYSQVWSM

SEQ ID NO: 9730 - protein, 9 aa, Homo sapiens
IPVRIPVSR

SEQ ID NO: 9731 - protein, 9 aa, Homo sapiens
QPESSANIR

SEQ ID NO: 9732 - protein, 9 aa, Homo sapiens
GYRRDLMTA

SEQ ID NO: 9733 - protein, 9 aa, Homo sapiens
NVGSVDVDV

SEQ ID NO: 9734 - protein, 9 aa, Homo sapiens
MTAGVLWGL

SEQ ID NO: 9735 - protein, 9 aa, Homo sapiens
YVNVGSVDV

SEQ ID NO: 9736 - protein, 9 aa, Homo sapiens
FTGVALLLY

SEQ ID NO: 9737 - protein, 9 aa, Homo sapiens
NGHVPIQSK

SEQ ID NO: 9738 - protein, 9 aa, Homo sapiens
LLLYALFHK

SEQ ID NO: 9739 - protein, 9 aa, Homo sapiens
SISGPDGYR

SEQ ID NO: 9740 - protein, 9 aa, Homo sapiens
VVYSQVWSM

SEQ ID NO: 9741 - protein, 9 aa, Homo sapiens
QVIYSSVKK

SEQ ID NO: 9742 - protein, 9 aa, Homo sapiens
SQVIYSSVK

SEQ ID NO: 9743 - protein, 9 aa, Homo sapiens
NIRTLLENK

SEQ ID NO: 9744 - protein, 9 aa, Homo sapiens
IPVRIPVSR

SEQ ID NO: 9745 - protein, 9 aa, Homo sapiens
GVLWGLFGV

SEQ ID NO: 9746 - protein, 9 aa, Homo sapiens
GVALLLYAL

SEQ ID NO: 9747 - protein, 9 aa, Homo sapiens
AVKESDAGK

SEQ ID NO: 9748 - protein, 9 aa, Homo sapiens
QPESSANIR

SEQ ID NO: 9749 - protein, 9 aa, Homo sapiens
LLYALFHKI

SEQ ID NO: 9750 - protein, 9 aa, Homo sapiens
KVVNIPVRI

SEQ ID NO: 9751 - protein, 9 aa, Homo sapiens
VLWGLFGVL

SEQ ID NO: 9752 - protein, 9 aa, Homo sapiens
ISGPDGYRR

SEQ ID NO: 9753 - protein, 9 aa, Homo sapiens
SDAGKYYCR

SEQ ID NO: 9754 - protein, 9 aa, Homo sapiens
MTAGVLWGL

SEQ ID NO: 9755 - protein, 9 aa, Homo sapiens
ALLLYALFH

SEQ ID NO: 9756 - protein, 9 aa, Homo sapiens
SKVVNIPVR

SEQ ID NO: 9757 - protein, 9 aa, Homo sapiens
RIPVSRPVL

SEQ ID NO: 9758 - protein, 9 aa, Homo sapiens
ESSATNEPR

SEQ ID NO: 9759 - protein, 9 aa, Homo sapiens
SISGPDGYR

SEQ ID NO: 9760 - protein, 9 aa, Homo sapiens
VSRPVLTLR

SEQ ID NO: 9761 - protein, 9 aa, Homo sapiens
ISGPDGYRR

SEQ ID NO: 9762 - protein, 9 aa, Homo sapiens
QPESSANIR

SEQ ID NO: 9763 - protein, 9 aa, Homo sapiens
TNEPRGASR

SEQ ID NO: 9764 - protein, 9 aa, Homo sapiens
IPVRIPVSR

SEQ ID NO: 9765 - protein, 9 aa, Homo sapiens
DVTLGNSSA

SEQ ID NO: 9766 - protein, 9 aa, Homo sapiens
DSQVIYSSV

SEQ ID NO: 9767 - protein, 9 aa, Homo sapiens
ESSANIRTL

SEQ ID NO: 9768 - protein, 9 aa, Homo sapiens
DVDVVYSQV

SEQ ID NO: 9769 - protein, 9 aa, Homo sapiens
DVVYSQVWS

SEQ ID NO: 9770 - protein, 9 aa, Homo sapiens
ESDAGKYYC

SEQ ID NO: 9771 - protein, 9 aa, Homo sapiens
ELQPVYVNV

SEQ ID NO: 9772 - protein, 9 aa, Homo sapiens
DLLELHCEA

SEQ ID NO: 9773 - protein, 9 aa, Homo sapiens
NVGSVDVDV

SEQ ID NO: 9774 - protein, 9 aa, Homo sapiens
SVDVDVVYS

SEQ ID NO: 9775 - protein, 9 aa, Homo sapiens
LYQFYHEDV

SEQ ID NO: 9776 - protein, 9 aa, Homo sapiens
TYSSPTPDM

SEQ ID NO: 9777 - protein, 9 aa, Homo sapiens
NIPVRIPVS

SEQ ID NO: 9778 - protein, 9 aa, Homo sapiens
VRIPVSRPV

SEQ ID NO: 9779 - protein, 9 aa, Homo sapiens
RIPVSRPVL

SEQ ID NO: 9780 - protein, 9 aa, Homo sapiens
LGFTGVALL

SEQ ID NO: 9781 - protein, 9 aa, Homo sapiens
AAVGDLLEL

SEQ ID NO: 9782 - protein, 9 aa, Homo sapiens
ESSANIRTL

SEQ ID NO: 9783 - protein, 9 aa, Homo sapiens
SSANIRTLL

SEQ ID NO: 9784 - protein, 9 aa, Homo sapiens
DGYRRDLMT

SEQ ID NO: 9785 - protein, 9 aa, Homo sapiens
RRDLMTAGV

SEQ ID NO: 9786 - protein, 9 aa, Homo sapiens
NIPVRIPVS

SEQ ID NO: 9787 - protein, 9 aa, Homo sapiens
EALRGSPPI

SEQ ID NO: 9788 - protein, 9 aa, Homo sapiens
GVLWGLFGV

SEQ ID NO: 9789 - protein, 9 aa, Homo sapiens
GVALLLYAL

SEQ ID NO: 9790 - protein, 9 aa, Homo sapiens
VNIPVRIPV

SEQ ID NO: 9791 - protein, 9 aa, Homo sapiens
MTAGVLWGL

SEQ ID NO: 9792 - protein, 9 aa, Homo sapiens
VLWGLFGVL

SEQ ID NO: 9793 - protein, 9 aa, Homo sapiens
GAQAAVGDL

SEQ ID NO: 9794 - protein, 9 aa, Homo sapiens
VVYSQVWSM

SEQ ID NO: 9795 - protein, 9 aa, Homo sapiens
SPTPDMEEL

SEQ ID NO: 9796 - protein, 9 aa, Homo sapiens
SRPNPQEFT

SEQ ID NO: 9797 - protein, 9 aa, Homo sapiens
SRPVLTLRS

SEQ ID NO: 9798 - protein, 9 aa, Homo sapiens
CEANNGLGA

SEQ ID NO: 9799 - protein, 9 aa, Homo sapiens
LEIPAVKES

SEQ ID NO: 9800 - protein, 9 aa, Homo sapiens
QEFTYSSPT

SEQ ID NO: 9801 - protein, 9 aa, Homo sapiens
SEAVPVSIS

SEQ ID NO: 9802 - protein, 9 aa, Homo sapiens
VDVVYSQVW

SEQ ID NO: 9803 - protein, 9 aa, Homo sapiens
AEHSGNYSC

SEQ ID NO: 9804 - protein, 9 aa, Homo sapiens
RDLMTAGVL

SEQ ID NO: 9805 - protein, 9 aa, Homo sapiens
ASFNLSLTA

SEQ ID NO: 9806 - protein, 9 aa, Homo sapiens
LENKDSQVI

SEQ ID NO: 9807 - protein, 9 aa, Homo sapiens
AAVGDLLEL

SEQ ID NO: 9808 - protein, 9 aa, Homo sapiens
KESDAGKYY

SEQ ID NO: 9809 - protein, 9 aa, Homo sapiens
EELQPVYVN

SEQ ID NO: 9810 - protein, 9 aa, Homo sapiens
LGFTGVALL

SEQ ID NO: 9811 - protein, 9 aa, Homo sapiens
EDVTLGNSS

SEQ ID NO: 9812 - protein, 9 aa, Homo sapiens
TGVALLLYA

SEQ ID NO: 9813 - protein, 9 aa, Homo sapiens
HEDVTLGNS

SEQ ID NO: 9814 - protein, 9 aa, Homo sapiens
GGASFNLSL

SEQ ID NO: 9815 - protein, 9 aa, Homo sapiens
SSAPSGGGA

SEQ ID NO: 9816 - protein, 9 aa, Homo sapiens
MEELQPVYV

SEQ ID NO: 9817 - protein, 9 aa, Homo sapiens
AELEIPAVK

SEQ ID NO: 9818 - protein, 9 aa, Homo sapiens
RDLMTAGVL

SEQ ID NO: 9819 - protein, 9 aa, Homo sapiens
AAVGDLLEL

SEQ ID NO: 9820 - protein, 9 aa, Homo sapiens
MEELQPVYV

SEQ ID NO: 9821 - protein, 9 aa, Homo sapiens
GGASFNLSL

SEQ ID NO: 9822 - protein, 9 aa, Homo sapiens
CEANNGLGA

SEQ ID NO: 9823 - protein, 9 aa, Homo sapiens
SSANIRTLL

SEQ ID NO: 9824 - protein, 9 aa, Homo sapiens
MTAGVLWGL

SEQ ID NO: 9825 - protein, 9 aa, Homo sapiens
LENKDSQVI

SEQ ID NO: 9826 - protein, 9 aa, Homo sapiens
ESSANIRTL

SEQ ID NO: 9827 - protein, 9 aa, Homo sapiens
AEHSGNYSC

SEQ ID NO: 9828 - protein, 9 aa, Homo sapiens
EELQPVYVN

SEQ ID NO: 9829 - protein, 9 aa, Homo sapiens
AQAAVGDLL

SEQ ID NO: 9830 - protein, 9 aa, Homo sapiens
YSCEANNGL

SEQ ID NO: 9831 - protein, 9 aa, Homo sapiens
QEFTYSSPT

SEQ ID NO: 9832 - protein, 9 aa, Homo sapiens
MGKKTQRSL

SEQ ID NO: 9833 - protein, 9 aa, Homo sapiens
LGFTGVALL

SEQ ID NO: 9834 - protein, 9 aa, Homo sapiens
SGGGASFNL

SEQ ID NO: 9835 - protein, 9 aa, Homo sapiens
GPDGYRRDL

SEQ ID NO: 9836 - protein, 9 aa, Homo sapiens
GAQAAVGDL

SEQ ID NO: 9837 - protein, 9 aa, Homo sapiens
SPTPDMEEL

SEQ ID NO: 9838 - protein, 9 aa, Homo sapiens
CEANNGLGA

SEQ ID NO: 9839 - protein, 9 aa, Homo sapiens
MEELQPVYV

SEQ ID NO: 9840 - protein, 9 aa, Homo sapiens
QEFTYSSPT

SEQ ID NO: 9841 - protein, 9 aa, Homo sapiens
LENKDSQVI

SEQ ID NO: 9842 - protein, 9 aa, Homo sapiens
AEHSGNYSC

SEQ ID NO: 9843 - protein, 9 aa, Homo sapiens
EELQPVYVN

SEQ ID NO: 9844 - protein, 9 aa, Homo sapiens
RDLMTAGVL

SEQ ID NO: 9845 - protein, 9 aa, Homo sapiens
LGAQCSEAV

SEQ ID NO: 9846 - protein, 9 aa, Homo sapiens
FGVLGFTGV

SEQ ID NO: 9847 - protein, 9 aa, Homo sapiens
VNIPVRIPV

SEQ ID NO: 9848 - protein, 9 aa, Homo sapiens
SAELEIPAV

SEQ ID NO: 9849 - protein, 9 aa, Homo sapiens
SEAVPVSIS

SEQ ID NO: 9850 - protein, 9 aa, Homo sapiens
LEIPAVKES

SEQ ID NO: 9851 - protein, 9 aa, Homo sapiens
ASFNLSLTA

SEQ ID NO: 9852 - protein, 9 aa, Homo sapiens
RSPGAQAAV

SEQ ID NO: 9853 - protein, 9 aa, Homo sapiens
TGVALLLYA

SEQ ID NO: 9854 - protein, 9 aa, Homo sapiens
PDMEELQPV

SEQ ID NO: 9855 - protein, 9 aa, Homo sapiens
YCRADNGHV

SEQ ID NO: 9856 - protein, 9 aa, Homo sapiens
IPAVKESDA

SEQ ID NO: 9857 - protein, 9 aa, Homo sapiens
LSAELEIPA

SEQ ID NO: 9858 - protein, 9 aa, Homo sapiens
TQRSLSAEL

SEQ ID NO: 9859 - protein, 9 aa, Homo sapiens
TAGVLWGLF

SEQ ID NO: 9860 - protein, 9 aa, Homo sapiens
AQAAVGDLL

SEQ ID NO: 9861 - protein, 9 aa, Homo sapiens
ALRGSPPIL

SEQ ID NO: 9862 - protein, 9 aa, Homo sapiens
DLMTAGVLW

SEQ ID NO: 9863 - protein, 9 aa, Homo sapiens
TLRSPGAQA

SEQ ID NO: 9864 - protein, 9 aa, Homo sapiens
ELQPVYVNV

SEQ ID NO: 9865 - protein, 9 aa, Homo sapiens
VLWGLFGVL

SEQ ID NO: 9866 - protein, 9 aa, Homo sapiens
GLFGVLGFT

SEQ ID NO: 9867 - protein, 9 aa, Homo sapiens
FTGVALLLY

SEQ ID NO: 9868 - protein, 9 aa, Homo sapiens
APSGGGASF

SEQ ID NO: 9869 - protein, 9 aa, Homo sapiens
WGLFGVLGF

SEQ ID NO: 9870 - protein, 9 aa, Homo sapiens
AQCSEAVPV

SEQ ID NO: 9871 - protein, 9 aa, Homo sapiens
VLGFTGVAL

SEQ ID NO: 9872 - protein, 9 aa, Homo sapiens
QQPESSANI

SEQ ID NO: 9873 - protein, 9 aa, Homo sapiens
DLLELHCEA

SEQ ID NO: 9874 - protein, 9 aa, Homo sapiens
GLGAQCSEA

SEQ ID NO: 9875 - protein, 9 aa, Homo sapiens
LLYALFHKI

SEQ ID NO: 9876 - protein, 9 aa, Homo sapiens
VALLLYALF

SEQ ID NO: 9877 - protein, 9 aa, Homo sapiens
SPPILYQFY

SEQ ID NO: 9878 - protein, 9 aa, Homo sapiens
ALRGSPPIL

SEQ ID NO: 9879 - protein, 9 aa, Homo sapiens
SPTPDMEEL

SEQ ID NO: 9880 - protein, 9 aa, Homo sapiens
TQRSLSAEL

SEQ ID NO: 9881 - protein, 9 aa, Homo sapiens
GPDGYRRDL

SEQ ID NO: 9882 - protein, 9 aa, Homo sapiens
AAVGDLLEL

SEQ ID NO: 9883 - protein, 9 aa, Homo sapiens
GVALLLYAL

SEQ ID NO: 9884 - protein, 9 aa, Homo sapiens
AQAAVGDLL

SEQ ID NO: 9885 - protein, 9 aa, Homo sapiens
GAQAAVGDL

SEQ ID NO: 9886 - protein, 9 aa, Homo sapiens
SSANIRTLL

SEQ ID NO: 9887 - protein, 9 aa, Homo sapiens
RIPVSRPVL

SEQ ID NO: 9888 - protein, 9 aa, Homo sapiens
VVYSQVWSM

SEQ ID NO: 9889 - protein, 9 aa, Homo sapiens
SGGGASFNL

SEQ ID NO: 9890 - protein, 9 aa, Homo sapiens
MGKKTQRSL

SEQ ID NO: 9891 - protein, 9 aa, Homo sapiens
YSCEANNGL

SEQ ID NO: 9892 - protein, 9 aa, Homo sapiens
ESSANIRTL

SEQ ID NO: 9893 - protein, 9 aa, Homo sapiens
LGFTGVALL

SEQ ID NO: 9894 - protein, 9 aa, Homo sapiens
GGASFNLSL

SEQ ID NO: 9895 - protein, 9 aa, Homo sapiens
VLGFTGVAL

SEQ ID NO: 9896 - protein, 9 aa, Homo sapiens
MTAGVLWGL

SEQ ID NO: 9897 - protein, 9 aa, Homo sapiens
EPRGASRPN

SEQ ID NO: 9898 - protein, 9 aa, Homo sapiens
ALRGSPPIL

SEQ ID NO: 9899 - protein, 9 aa, Homo sapiens
TQRSLSAEL

SEQ ID NO: 9900 - protein, 9 aa, Homo sapiens
EPRGASRPN

SEQ ID NO: 9901 - protein, 9 aa, Homo sapiens
GAQAAVGDL

SEQ ID NO: 9902 - protein, 9 aa, Homo sapiens
IPVSRPVLT

SEQ ID NO: 9903 - protein, 9 aa, Homo sapiens
IPAVKESDA

SEQ ID NO: 9904 - protein, 9 aa, Homo sapiens
MGKKTQRSL

SEQ ID NO: 9905 - protein, 9 aa, Homo sapiens
QSKVVNIPV

SEQ ID NO: 9906 - protein, 9 aa, Homo sapiens
YCRADNGHV

SEQ ID NO: 9907 - protein, 9 aa, Homo sapiens
ESSANIRTL

SEQ ID NO: 9908 - protein, 9 aa, Homo sapiens
VLTLRSPGA

SEQ ID NO: 9909 - protein, 9 aa, Homo sapiens
VLGFTGVAL

SEQ ID NO: 9910 - protein, 9 aa, Homo sapiens
TLRSPGAQA

SEQ ID NO: 9911 - protein, 9 aa, Homo sapiens
EALRGSPPI

SEQ ID NO: 9912 - protein, 9 aa, Homo sapiens
VLWGLFGVL

SEQ ID NO: 9913 - protein, 9 aa, Homo sapiens
ENKDSQVIY

SEQ ID NO: 9914 - protein, 9 aa, Homo sapiens
YSCEANNGL

SEQ ID NO: 9915 - protein, 9 aa, Homo sapiens
LLENKDSQV

SEQ ID NO: 9916 - protein, 9 aa, Homo sapiens
MTAGVLWGL

SEQ ID NO: 9917 - protein, 9 aa, Homo sapiens
SSANIRTLL

SEQ ID NO: 9918 - protein, 9 aa, Homo sapiens
LRGSPPILY

SEQ ID NO: 9919 - protein, 9 aa, Homo sapiens
RRDLMTAGV

SEQ ID NO: 9920 - protein, 9 aa, Homo sapiens
SRPNPQEFT

SEQ ID NO: 9921 - protein, 9 aa, Homo sapiens
LRSPGAQAA

SEQ ID NO: 9922 - protein, 9 aa, Homo sapiens
YQFYHEDVT

SEQ ID NO: 9923 - protein, 9 aa, Homo sapiens
SRPVLTLRS

SEQ ID NO: 9924 - protein, 9 aa, Homo sapiens
VRIPVSRPV

SEQ ID NO: 9925 - protein, 9 aa, Homo sapiens
QQPESSANI

SEQ ID NO: 9926 - protein, 9 aa, Homo sapiens
AQAAVGDLL

SEQ ID NO: 9927 - protein, 9 aa, Homo sapiens
TQRSLSAEL

SEQ ID NO: 9928 - protein, 9 aa, Homo sapiens
VLWGLFGVL

SEQ ID NO: 9929 - protein, 9 aa, Homo sapiens
LLYALFHKI

SEQ ID NO: 9930 - protein, 9 aa, Homo sapiens
RPNPQEFTY

SEQ ID NO: 9931 - protein, 9 aa, Homo sapiens
KESDAGKYY

SEQ ID NO: 9932 - protein, 9 aa, Homo sapiens
AQCSEAVPV

SEQ ID NO: 9933 - protein, 9 aa, Homo sapiens
IRTLLENKD

SEQ ID NO: 9934 - protein, 9 aa, Homo sapiens
QRSLSAELE

SEQ ID NO: 9935 - protein, 9 aa, Homo sapiens
YRRDLMTAG

SEQ ID NO: 9936 - protein, 9 aa, Homo sapiens
CRADNGHVP

SEQ ID NO: 9937 - protein, 9 aa, Homo sapiens
QEFTYSSPT

SEQ ID NO: 9938 - protein, 9 aa, Homo sapiens
RRDLMTAGV

SEQ ID NO: 9939 - protein, 9 aa, Homo sapiens
LRGSPPILY

SEQ ID NO: 9940 - protein, 9 aa, Homo sapiens
TQRSLSAEL

SEQ ID NO: 9941 - protein, 9 aa, Homo sapiens
SQVIYSSVK

SEQ ID NO: 9942 - protein, 9 aa, Homo sapiens
LRSPGAQAA

SEQ ID NO: 9943 - protein, 9 aa, Homo sapiens
AQAAVGDLL

SEQ ID NO: 9944 - protein, 9 aa, Homo sapiens
SRPVLTLRS

SEQ ID NO: 9945 - protein, 9 aa, Homo sapiens
SRPNPQEFT

SEQ ID NO: 9946 - protein, 9 aa, Homo sapiens
VRIPVSRPV

SEQ ID NO: 9947 - protein, 9 aa, Homo sapiens
VLWGLFGVL

SEQ ID NO: 9948 - protein, 9 aa, Homo sapiens
YQFYHEDVT

SEQ ID NO: 9949 - protein, 9 aa, Homo sapiens
AQCSEAVPV

SEQ ID NO: 9950 - protein, 9 aa, Homo sapiens
QQPESSANI

SEQ ID NO: 9951 - protein, 9 aa, Homo sapiens
LLYALFHKI

SEQ ID NO: 9952 - protein, 9 aa, Homo sapiens
RIPVSRPVL

SEQ ID NO: 9953 - protein, 9 aa, Homo sapiens
LLELHCEAL

SEQ ID NO: 9954 - protein, 9 aa, Homo sapiens
ALRGSPPIL

SEQ ID NO: 9955 - protein, 9 aa, Homo sapiens
LLLYALFHK

SEQ ID NO: 9956 - protein, 9 aa, Homo sapiens
AELEIPAVK

SEQ ID NO: 9957 - protein, 9 aa, Homo sapiens
VLGFTGVAL

SEQ ID NO: 9958 - protein, 9 aa, Homo sapiens
RPNPQEFTY

SEQ ID NO: 9959 - protein, 9 aa, Homo sapiens
SPPILYQFY

SEQ ID NO: 9960 - protein, 9 aa, Homo sapiens
SPTPDMEEL

SEQ ID NO: 9961 - protein, 9 aa, Homo sapiens
GSVDVDVVY

SEQ ID NO: 9962 - protein, 9 aa, Homo sapiens
APSGGGASF

SEQ ID NO: 9963 - protein, 9 aa, Homo sapiens
ASRPNPQEF

SEQ ID NO: 9964 - protein, 9 aa, Homo sapiens
ENKDSQVIY

SEQ ID NO: 9965 - protein, 9 aa, Homo sapiens
YSCEANNGL

SEQ ID NO: 9966 - protein, 9 aa, Homo sapiens
VSISGPDGY

SEQ ID NO: 9967 - protein, 9 aa, Homo sapiens
EPRGASRPN

SEQ ID NO: 9968 - protein, 9 aa, Homo sapiens
GPDGYRRDL

SEQ ID NO: 9969 - protein, 9 aa, Homo sapiens
GSPPILYQF

SEQ ID NO: 9970 - protein, 9 aa, Homo sapiens
ESSANIRTL

SEQ ID NO: 9971 - protein, 9 aa, Homo sapiens
SSANIRTLL

SEQ ID NO: 9972 - protein, 9 aa, Homo sapiens
AAVGDLLEL

SEQ ID NO: 9973 - protein, 9 aa, Homo sapiens
LTAEHSGNY

SEQ ID NO: 9974 - protein, 9 aa, Homo sapiens
NPQEFTYSS

SEQ ID NO: 9975 - protein, 9 aa, Homo sapiens
RSLSAELEI

SEQ ID NO: 9976 - protein, 9 aa, Homo sapiens
TAGVLWGLF

SEQ ID NO: 9977 - protein, 9 aa, Homo sapiens
QSKVVNIPV

SEQ ID NO: 9978 - protein, 9 aa, Homo sapiens
RDLMTAGVL

SEQ ID NO: 9979 - protein, 9 aa, Homo sapiens
LENKDSQVI

SEQ ID NO: 9980 - protein, 9 aa, Homo sapiens
SSANIRTLL

SEQ ID NO: 9981 - protein, 9 aa, Homo sapiens
AQAAVGDLL

SEQ ID NO: 9982 - protein, 9 aa, Homo sapiens
GFTGVALLL

SEQ ID NO: 9983 - protein, 9 aa, Homo sapiens
KDSQVIYSS

SEQ ID NO: 9984 - protein, 9 aa, Homo sapiens
LGFTGVALL

SEQ ID NO: 9985 - protein, 9 aa, Homo sapiens
VDVVYSQVW

SEQ ID NO: 9986 - protein, 9 aa, Homo sapiens
PDGYRRDLM

SEQ ID NO: 9987 - protein, 9 aa, Homo sapiens
EDVTLGNSS

SEQ ID NO: 9988 - protein, 9 aa, Homo sapiens
KESDAGKYY

SEQ ID NO: 9989 - protein, 9 aa, Homo sapiens
MEELQPVYV

SEQ ID NO: 9990 - protein, 9 aa, Homo sapiens
KVVNIPVRI

SEQ ID NO: 9991 - protein, 9 aa, Homo sapiens
MTAGVLWGL

SEQ ID NO: 9992 - protein, 9 aa, Homo sapiens
CSEAVPVSI

SEQ ID NO: 9993 - protein, 9 aa, Homo sapiens
SGGGASFNL

SEQ ID NO: 9994 - protein, 9 aa, Homo sapiens
EALRGSPPI

SEQ ID NO: 9995 - protein, 9 aa, Homo sapiens
AEHSGNYSC

SEQ ID NO: 9996 - protein, 9 aa, Homo sapiens
AAVGDLLEL

SEQ ID NO: 9997 - protein, 9 aa, Homo sapiens
LRGSPPILY

SEQ ID NO: 9998 - protein, 9 aa, Homo sapiens
YHEDVTLGN

SEQ ID NO: 9999 - protein, 9 aa, Homo sapiens
GPDGYRRDL

SEQ ID NO: 10000 - protein, 9 aa, Homo sapiens
GHVPIQSKV

SEQ ID NO: 10001 - protein, 9 aa, Homo sapiens
LHCEALRGS

SEQ ID NO: 10002 - protein, 9 aa, Homo sapiens
GFTGVALLL

SEQ ID NO: 10003 - protein, 9 aa, Homo sapiens
APSGGGASF

SEQ ID NO: 10004 - protein, 9 aa, Homo sapiens
LLELHCEAL

SEQ ID NO: 10005 - protein, 9 aa, Homo sapiens
MTAGVLWGL

SEQ ID NO: 10006 - protein, 9 aa, Homo sapiens
VLWGLFGVL

SEQ ID NO: 10007 - protein, 9 aa, Homo sapiens
YSCEANNGL

SEQ ID NO: 10008 - protein, 9 aa, Homo sapiens
SGGGASFNL

SEQ ID NO: 10009 - protein, 9 aa, Homo sapiens
SPTPDMEEL

SEQ ID NO: 10010 - protein, 9 aa, Homo sapiens
AAVGDLLEL

SEQ ID NO: 10011 - protein, 9 aa, Homo sapiens
QFYHEDVTL

SEQ ID NO: 10012 - protein, 9 aa, Homo sapiens
GAQAAVGDL

SEQ ID NO: 10013 - protein, 9 aa, Homo sapiens
TAGVLWGLF

SEQ ID NO: 10014 - protein, 9 aa, Homo sapiens
GVALLLYAL

SEQ ID NO: 10015 - protein, 9 aa, Homo sapiens
SSANIRTLL

SEQ ID NO: 10016 - protein, 9 aa, Homo sapiens
AQAAVGDLL

SEQ ID NO: 10017 - protein, 9 aa, Homo sapiens
GSPPILYQF

SEQ ID NO: 10018 - protein, 9 aa, Homo sapiens
GHVPIQSKV

SEQ ID NO: 10019 - protein, 9 aa, Homo sapiens
YHEDVTLGN

SEQ ID NO: 10020 - protein, 9 aa, Homo sapiens
RRDLMTAGV

SEQ ID NO: 10021 - protein, 9 aa, Homo sapiens
VRIPVSRPV

SEQ ID NO: 10022 - protein, 9 aa, Homo sapiens
AAVGDLLEL

SEQ ID NO: 10023 - protein, 9 aa, Homo sapiens
LGFTGVALL

SEQ ID NO: 10024 - protein, 9 aa, Homo sapiens
LHCEALRGS

SEQ ID NO: 10025 - protein, 9 aa, Homo sapiens
LLELHCEAL

SEQ ID NO: 10026 - protein, 9 aa, Homo sapiens
YSCEANNGL

SEQ ID NO: 10027 - protein, 9 aa, Homo sapiens
VLWGLFGVL

SEQ ID NO: 10028 - protein, 9 aa, Homo sapiens
SAELEIPAV

SEQ ID NO: 10029 - protein, 9 aa, Homo sapiens
GPDGYRRDL

SEQ ID NO: 10030 - protein, 9 aa, Homo sapiens
MTAGVLWGL

SEQ ID NO: 10031 - protein, 9 aa, Homo sapiens
GAQAAVGDL

SEQ ID NO: 10032 - protein, 9 aa, Homo sapiens
GVALLLYAL

SEQ ID NO: 10033 - protein, 9 aa, Homo sapiens
ESSANIRTL

SEQ ID NO: 10034 - protein, 9 aa, Homo sapiens
SPTPDMEEL

SEQ ID NO: 10035 - protein, 9 aa, Homo sapiens
DVDVVYSQV

SEQ ID NO: 10036 - protein, 9 aa, Homo sapiens
VVYSQVWSM

SEQ ID NO: 10037 - protein, 9 aa, Homo sapiens
QFYHEDVTL

SEQ ID NO: 10038 - protein, 9 aa, Homo sapiens
AQAAVGDLL

SEQ ID NO: 10039 - protein, 9 aa, Homo sapiens
TQRSLSAEL

SEQ ID NO: 10040 - protein, 9 aa, Homo sapiens
GGASFNLSL

SEQ ID NO: 10041 - protein, 9 aa, Homo sapiens
GVALLLYAL

SEQ ID NO: 10042 - protein, 9 aa, Homo sapiens
GPDGYRRDL

SEQ ID NO: 10043 - protein, 9 aa, Homo sapiens
MTAGVLWGL

SEQ ID NO: 10044 - protein, 9 aa, Homo sapiens
SSANIRTLL

SEQ ID NO: 10045 - protein, 9 aa, Homo sapiens
VLWGLFGVL

SEQ ID NO: 10046 - protein, 9 aa, Homo sapiens
GFTGVALLL

SEQ ID NO: 10047 - protein, 9 aa, Homo sapiens
LGFTGVALL

SEQ ID NO: 10048 - protein, 9 aa, Homo sapiens
RIPVSRPVL

SEQ ID NO: 10049 - protein, 9 aa, Homo sapiens
LLELHCEAL

SEQ ID NO: 10050 - protein, 9 aa, Homo sapiens
YSCEANNGL

SEQ ID NO: 10051 - protein, 9 aa, Homo sapiens
ESSANIRTL

SEQ ID NO: 10052 - protein, 9 aa, Homo sapiens
GAQAAVGDL

SEQ ID NO: 10053 - protein, 9 aa, Homo sapiens
SPTPDMEEL

SEQ ID NO: 10054 - protein, 9 aa, Homo sapiens
AAVGDLLEL

SEQ ID NO: 10055 - protein, 9 aa, Homo sapiens
QFYHEDVTL

SEQ ID NO: 10056 - protein, 9 aa, Homo sapiens
VLGFTGVAL

SEQ ID NO: 10057 - protein, 9 aa, Homo sapiens
SGGGASFNL

SEQ ID NO: 10058 - protein, 9 aa, Homo sapiens
KESDAGKYY

SEQ ID NO: 10059 - protein, 9 aa, Homo sapiens
LEIPAVKES

SEQ ID NO: 10060 - protein, 9 aa, Homo sapiens
SEAVPVSIS

SEQ ID NO: 10061 - protein, 9 aa, Homo sapiens
VSISGPDGY

SEQ ID NO: 10062 - protein, 9 aa, Homo sapiens
GSVDVDVVY

SEQ ID NO: 10063 - protein, 9 aa, Homo sapiens
SPPILYQFY

SEQ ID NO: 10064 - protein, 9 aa, Homo sapiens
RPNPQEFTY

SEQ ID NO: 10065 - protein, 9 aa, Homo sapiens
CEANNGLGA

SEQ ID NO: 10066 - protein, 9 aa, Homo sapiens
AEHSGNYSC

SEQ ID NO: 10067 - protein, 9 aa, Homo sapiens
EELQPVYVN

SEQ ID NO: 10068 - protein, 9 aa, Homo sapiens
FTGVALLLY

SEQ ID NO: 10069 - protein, 9 aa, Homo sapiens
WGLFGVLGF

SEQ ID NO: 10070 - protein, 9 aa, Homo sapiens
LTAEHSGNY

SEQ ID NO: 10071 - protein, 9 aa, Homo sapiens
HEDVTLGNS

SEQ ID NO: 10072 - protein, 9 aa, Homo sapiens
QEFTYSSPT

SEQ ID NO: 10073 - protein, 9 aa, Homo sapiens
LENKDSQVI

SEQ ID NO: 10074 - protein, 9 aa, Homo sapiens
ASRPNPQEF

SEQ ID NO: 10075 - protein, 9 aa, Homo sapiens
MEELQPVYV

SEQ ID NO: 10076 - protein, 9 aa, Homo sapiens
GSPPILYQF

SEQ ID NO: 10077 - protein, 9 aa, Homo sapiens
APSGGGASF

SEQ ID NO: 10078 - protein, 9 aa, Homo sapiens
EALRGSPPI

SEQ ID NO: 10079 - protein, 9 aa, Homo sapiens
GPDGYRRDL

SEQ ID NO: 10080 - protein, 9 aa, Homo sapiens
RADNGHVPI

SEQ ID NO: 10081 - protein, 9 aa, Homo sapiens
SPTPDMEEL

SEQ ID NO: 10082 - protein, 9 aa, Homo sapiens
SAELEIPAV

SEQ ID NO: 10083 - protein, 9 aa, Homo sapiens
AAVGDLLEL

SEQ ID NO: 10084 - protein, 9 aa, Homo sapiens
VGSVDVDVV

SEQ ID NO: 10085 - protein, 9 aa, Homo sapiens
FGVLGFTGV

SEQ ID NO: 10086 - protein, 9 aa, Homo sapiens
LGAQCSEAV

SEQ ID NO: 10087 - protein, 9 aa, Homo sapiens
LGFTGVALL

SEQ ID NO: 10088 - protein, 9 aa, Homo sapiens
GAQAAVGDL

SEQ ID NO: 10089 - protein, 9 aa, Homo sapiens
MGKKTQRSL

SEQ ID NO: 10090 - protein, 9 aa, Homo sapiens
SGGGASFNL

SEQ ID NO: 10091 - protein, 9 aa, Homo sapiens
GGASFNLSL

SEQ ID NO: 10092 - protein, 9 aa, Homo sapiens
IPAVKESDA

SEQ ID NO: 10093 - protein, 9 aa, Homo sapiens
EPRGASRPN

SEQ ID NO: 10094 - protein, 9 aa, Homo sapiens
IPVSRPVLT

SEQ ID NO: 10095 - protein, 9 aa, Homo sapiens
DAGKYYCRA

SEQ ID NO: 10096 - protein, 9 aa, Homo sapiens
LLYALFHKI

SEQ ID NO: 10097 - protein, 9 aa, Homo sapiens
DGYRRDLMT

SEQ ID NO: 10098 - protein, 9 aa, Homo sapiens
EALRGSPPI

SEQ ID NO: 10099 - protein, 9 aa, Homo sapiens
FGVLGFTGV

SEQ ID NO: 10100 - protein, 9 aa, Homo sapiens
AAVGDLLEL

SEQ ID NO: 10101 - protein, 9 aa, Homo sapiens
LGFTGVALL

SEQ ID NO: 10102 - protein, 9 aa, Homo sapiens
RADNGHVPI

SEQ ID NO: 10103 - protein, 9 aa, Homo sapiens
SPTPDMEEL

SEQ ID NO: 10104 - protein, 9 aa, Homo sapiens
GPDGYRRDL

SEQ ID NO: 10105 - protein, 9 aa, Homo sapiens
SAELEIPAV

SEQ ID NO: 10106 - protein, 9 aa, Homo sapiens
GAQAAVGDL

SEQ ID NO: 10107 - protein, 9 aa, Homo sapiens
LGAQCSEAV

SEQ ID NO: 10108 - protein, 9 aa, Homo sapiens
LLYALFHKI

SEQ ID NO: 10109 - protein, 9 aa, Homo sapiens
VGSVDVDVV

SEQ ID NO: 10110 - protein, 9 aa, Homo sapiens
IPVSRPVLT

SEQ ID NO: 10111 - protein, 9 aa, Homo sapiens
KVVNIPVRI

SEQ ID NO: 10112 - protein, 9 aa, Homo sapiens
SGGGASFNL

SEQ ID NO: 10113 - protein, 9 aa, Homo sapiens
GGASFNLSL

SEQ ID NO: 10114 - protein, 9 aa, Homo sapiens
QPVYVNVGS

SEQ ID NO: 10115 - protein, 9 aa, Homo sapiens
VPIQSKVVN

SEQ ID NO: 10116 - protein, 9 aa, Homo sapiens
MGKKTQRSL

SEQ ID NO: 10117 - protein, 9 aa, Homo sapiens
RSLSAELEI

SEQ ID NO: 10118 - protein, 9 aa, Homo sapiens
RADNGHVPI

SEQ ID NO: 10119 - protein, 9 aa, Homo sapiens
EALRGSPPI

SEQ ID NO: 10120 - protein, 9 aa, Homo sapiens
SAELEIPAV

SEQ ID NO: 10121 - protein, 9 aa, Homo sapiens
FGVLGFTGV

SEQ ID NO: 10122 - protein, 9 aa, Homo sapiens
VGSVDVDVV

SEQ ID NO: 10123 - protein, 9 aa, Homo sapiens
LGAQCSEAV

SEQ ID NO: 10124 - protein, 9 aa, Homo sapiens
GAQAAVGDL

SEQ ID NO: 10125 - protein, 9 aa, Homo sapiens
AAVGDLLEL

SEQ ID NO: 10126 - protein, 9 aa, Homo sapiens
LGFTGVALL

SEQ ID NO: 10127 - protein, 9 aa, Homo sapiens
DGYRRDLMT

SEQ ID NO: 10128 - protein, 9 aa, Homo sapiens
GPDGYRRDL

SEQ ID NO: 10129 - protein, 9 aa, Homo sapiens
SGGGASFNL

SEQ ID NO: 10130 - protein, 9 aa, Homo sapiens
MGKKTQRSL

SEQ ID NO: 10131 - protein, 9 aa, Homo sapiens
SPTPDMEEL

SEQ ID NO: 10132 - protein, 9 aa, Homo sapiens
GGASFNLSL

SEQ ID NO: 10133 - protein, 9 aa, Homo sapiens
LLYALFHKI

SEQ ID NO: 10134 - protein, 9 aa, Homo sapiens
DAGKYYCRA

SEQ ID NO: 10135 - protein, 9 aa, Homo sapiens
GASFNLSLT

SEQ ID NO: 10136 - protein, 9 aa, Homo sapiens
SATNEPRGA

SEQ ID NO: 10137 - protein, 9 aa, Homo sapiens
DVDVVYSQV

SEQ ID NO: 10138 - protein, 9 aa, Homo sapiens
VGSVDVDVV

SEQ ID NO: 10139 - protein, 9 aa, Homo sapiens
YQFYHEDVT

SEQ ID NO: 10140 - protein, 9 aa, Homo sapiens
VLWGLFGVL

SEQ ID NO: 10141 - protein, 9 aa, Homo sapiens
HVPIQSKVV

SEQ ID NO: 10142 - protein, 9 aa, Homo sapiens
QQPESSANI

SEQ ID NO: 10143 - protein, 9 aa, Homo sapiens
LENKDSQVI

SEQ ID NO: 10144 - protein, 9 aa, Homo sapiens
LLYALFHKI

SEQ ID NO: 10145 - protein, 9 aa, Homo sapiens
LGFTGVALL

SEQ ID NO: 10146 - protein, 9 aa, Homo sapiens
AQCSEAVPV

SEQ ID NO: 10147 - protein, 9 aa, Homo sapiens
LGAQCSEAV

SEQ ID NO: 10148 - protein, 9 aa, Homo sapiens
FGVLGFTGV

SEQ ID NO: 10149 - protein, 9 aa, Homo sapiens
SPPILYQFY

SEQ ID NO: 10150 - protein, 9 aa, Homo sapiens
WGLFGVLGF

SEQ ID NO: 10151 - protein, 9 aa, Homo sapiens
DGYRRDLMT

SEQ ID NO: 10152 - protein, 9 aa, Homo sapiens
VNIPVRIPV

SEQ ID NO: 10153 - protein, 9 aa, Homo sapiens
RDLMTAGVL

SEQ ID NO: 10154 - protein, 9 aa, Homo sapiens
DVDVVYSQV

SEQ ID NO: 10155 - protein, 9 aa, Homo sapiens
RIPVSRPVL

SEQ ID NO: 10156 - protein, 9 aa, Homo sapiens
AQAAVGDLL

SEQ ID NO: 10157 - protein, 9 aa, Homo sapiens
APSGGGASF

SEQ ID NO: 10158 - protein, 9 aa, Homo sapiens
GSPPILYQF

SEQ ID NO: 10159 - protein, 9 aa, Homo sapiens
ASRPNPQEF

SEQ ID NO: 10160 - protein, 9 aa, Homo sapiens
VALLLYALF

SEQ ID NO: 10161 - protein, 9 aa, Homo sapiens
TAGVLWGLF

SEQ ID NO: 10162 - protein, 9 aa, Homo sapiens
LTAEHSGNY

SEQ ID NO: 10163 - protein, 9 aa, Homo sapiens
GSVDVDVVY

SEQ ID NO: 10164 - protein, 9 aa, Homo sapiens
FTGVALLLY

SEQ ID NO: 10165 - protein, 9 aa, Homo sapiens
RSLSAELEI

SEQ ID NO: 10166 - protein, 9 aa, Homo sapiens
RSPGAQAAV

SEQ ID NO: 10167 - protein, 9 aa, Homo sapiens
VSISGPDGY

SEQ ID NO: 10168 - protein, 9 aa, Homo sapiens
LSAELEIPA

SEQ ID NO: 10169 - protein, 9 aa, Homo sapiens
YSCEANNGL

SEQ ID NO: 10170 - protein, 9 aa, Homo sapiens
SSAPSGGGA

SEQ ID NO: 10171 - protein, 9 aa, Homo sapiens
ASFNLSLTA

SEQ ID NO: 10172 - protein, 9 aa, Homo sapiens
MTAGVLWGL

SEQ ID NO: 10173 - protein, 9 aa, Homo sapiens
RADNGHVPI

SEQ ID NO: 10174 - protein, 9 aa, Homo sapiens
QSKVVNIPV

SEQ ID NO: 10175 - protein, 9 aa, Homo sapiens
SSANTRTLL

SEQ ID NO: 10176 - protein, 9 aa, Homo sapiens
CSEAVPVSI

SEQ ID NO: 10177 - protein, 9 aa, Homo sapiens
WGLFGVLGF

SEQ ID NO: 10178 - protein, 9 aa, Homo sapiens
VALLLYALF

SEQ ID NO: 10179 - protein, 9 aa, Homo sapiens
AAVGDLLEL

SEQ ID NO: 10180 - protein, 9 aa, Homo sapiens
LLYALFHKI

SEQ ID NO: 10181 - protein, 9 aa, Homo sapiens
RDLMTAGVL

SEQ ID NO: 10182 - protein, 9 aa, Homo sapiens
SPTPDMEEL

SEQ ID NO: 10183 - protein, 9 aa, Homo sapiens
EALRGSPPI

SEQ ID NO: 10184 - protein, 9 aa, Homo sapiens
QFYHEDVTL

SEQ ID NO: 10185 - protein, 9 aa, Homo sapiens
VRIPVSRPV

SEQ ID NO: 10186 - protein, 9 aa, Homo sapiens
VLWGLFGVL

SEQ ID NO: 10187 - protein, 9 aa, Homo sapiens
GHVPIQSKV

SEQ ID NO: 10188 - protein, 9 aa, Homo sapiens
LGFTGVALL

SEQ ID NO: 10189 - protein, 9 aa, Homo sapiens
KVVNIPVRI

SEQ ID NO: 10190 - protein, 9 aa, Homo sapiens
FGVLGFTGV

SEQ ID NO: 10191 - protein, 9 aa, Homo sapiens
VVYSQVWSM

SEQ ID NO: 10192 - protein, 9 aa, Homo sapiens
WGLFGVLGF

SEQ ID NO: 10193 - protein, 9 aa, Homo sapiens
GAQAAVGDL

SEQ ID NO: 10194 - protein, 9 aa, Homo sapiens
YSCEANNGL

SEQ ID NO: 10195 - protein, 9 aa, Homo sapiens
ESSANIRTL

SEQ ID NO: 10196 - protein, 9 aa, Homo sapiens
VNIPVRIPV

SEQ ID NO: 10197 - protein, 9 aa, Homo sapiens
GSPPILYQF

SEQ ID NO: 10198 - protein, 9 aa, Homo sapiens
QFYHEDVTL

SEQ ID NO: 10199 - protein, 9 aa, Homo sapiens
GFTGVALLL

SEQ ID NO: 10200 - protein, 9 aa, Homo sapiens
GPDGYRRDL

SEQ ID NO: 10201 - protein, 9 aa, Homo sapiens
SPTPDMEEL

SEQ ID NO: 10202 - protein, 9 aa, Homo sapiens
TYSSPTPDM

SEQ ID NO: 10203 - protein, 9 aa, Homo sapiens
APSGGGASF

SEQ ID NO: 10204 - protein, 9 aa, Homo sapiens
LYQFYHEDV

SEQ ID NO: 10205 - protein, 9 aa, Homo sapiens
RPNPQEFTY

SEQ ID NO: 10206 - protein, 9 aa, Homo sapiens
GYRRDLMTA

SEQ ID NO: 10207 - protein, 9 aa, Homo sapiens
SPPILYQFY

SEQ ID NO: 10208 - protein, 9 aa, Homo sapiens
LGFTGVALL

SEQ ID NO: 10209 - protein, 9 aa, Homo sapiens
GAQAAVGDL

SEQ ID NO: 10210 - protein, 9 aa, Homo sapiens
MTAGVLWGL

SEQ ID NO: 10211 - protein, 9 aa, Homo sapiens
GVALLLYAL

SEQ ID NO: 10212 - protein, 9 aa, Homo sapiens
AAVGDLLEL

SEQ ID NO: 10213 - protein, 9 aa, Homo sapiens
ESSANIRTL

SEQ ID NO: 10214 - protein, 9 aa, Homo sapiens
MGKKTQRSL

SEQ ID NO: 10215 - protein, 9 aa, Homo sapiens
YSCEANNGL

SEQ ID NO: 10216 - protein, 9 aa, Homo sapiens
GSPPILYQF

SEQ ID NO: 10217 - protein, 9 aa, Homo sapiens
VLGFTGVAL

SEQ ID NO: 10218 - protein, 9 aa, Homo sapiens
GVALLLYAL

SEQ ID NO: 10219 - protein, 9 aa, Homo sapiens
TQRSLSAEL

SEQ ID NO: 10220 - protein, 9 aa, Homo sapiens
SSANIRTLL

SEQ ID NO: 10221 - protein, 9 aa, Homo sapiens
VLWGLFGVL

SEQ ID NO: 10222 - protein, 9 aa, Homo sapiens
GGASFNLSL

SEQ ID NO: 10223 - protein, 9 aa, Homo sapiens
AAVGDLLEL

SEQ ID NO: 10224 - protein, 9 aa, Homo sapiens
ESSANIRTL

SEQ ID NO: 10225 - protein, 9 aa, Homo sapiens
GAQAAVGDL

SEQ ID NO: 10226 - protein, 9 aa, Homo sapiens
MTAGVLWGL

SEQ ID NO: 10227 - protein, 9 aa, Homo sapiens
LGFTGVALL

SEQ ID NO: 10228 - protein, 9 aa, Homo sapiens
SPPILYQFY

SEQ ID NO: 10229 - protein, 9 aa, Homo sapiens
RRDLMTAGV

SEQ ID NO: 10230 - protein, 9 aa, Homo sapiens
KVVNIPVRI

SEQ ID NO: 10231 - protein, 9 aa, Homo sapiens
DMEELQPVY

SEQ ID NO: 10232 - protein, 9 aa, Homo sapiens
LLYALFHKI

SEQ ID NO: 10233 - protein, 9 aa, Homo sapiens
GHVPIQSKV

SEQ ID NO: 10234 - protein, 9 aa, Homo sapiens
DSQVIYSSV

SEQ ID NO: 10235 - protein, 9 aa, Homo sapiens
GPDGYRRDL

SEQ ID NO: 10236 - protein, 9 aa, Homo sapiens
YSCEANNGL

SEQ ID NO: 10237 - protein, 9 aa, Homo sapiens
SPTPDMEEL

SEQ ID NO: 10238 - protein, 9 aa, Homo sapiens
SPPILYQFY

SEQ ID NO: 10239 - protein, 9 aa, Homo sapiens
RPNPQEFTY

SEQ ID NO: 10240 - protein, 9 aa, Homo sapiens
FTGVALLLY

SEQ ID NO: 10241 - protein, 9 aa, Homo sapiens
LRGSPPILY

SEQ ID NO: 10242 - protein, 9 aa, Homo sapiens
GSVDVDVVY

SEQ ID NO: 10243 - protein, 9 aa, Homo sapiens
GSPPILYQF

SEQ ID NO: 10244 - protein, 9 aa, Homo sapiens
DMEELQPVY

SEQ ID NO: 10245 - protein, 9 aa, Homo sapiens
LTAEHSGNY

SEQ ID NO: 10246 - protein, 9 aa, Homo sapiens
GVALLLYAL

SEQ ID NO: 10247 - protein, 9 aa, Homo sapiens
ENKDSQVIY

SEQ ID NO: 10248 - protein, 9 aa, Homo sapiens
KESDAGKYY

SEQ ID NO: 10249 - protein, 9 aa, Homo sapiens
MTAGVLWGL

SEQ ID NO: 10250 - protein, 9 aa, Homo sapiens
TAGVLWGLF

SEQ ID NO: 10251 - protein, 9 aa, Homo sapiens
VALLLYALF

SEQ ID NO: 10252 - protein, 9 aa, Homo sapiens
VSISGPDGY

SEQ ID NO: 10253 - protein, 9 aa, Homo sapiens
APSGGGASF

SEQ ID NO: 10254 - protein, 9 aa, Homo sapiens
SSANIRTLL

SEQ ID NO: 10255 - protein, 9 aa, Homo sapiens
GGASFNLSL

SEQ ID NO: 10256 - protein, 9 aa, Homo sapiens
LYALFHKIS

SEQ ID NO: 10257 - protein, 9 aa, Homo sapiens
AQAAVGDLL

SEQ ID NO: 10258 - protein, 9 aa, Homo sapiens
ESSANIRTL

SEQ ID NO: 10259 - protein, 9 aa, Homo sapiens
GASFNLSLT

SEQ ID NO: 10260 - protein, 9 aa, Homo sapiens
AAVGDLLEL

SEQ ID NO: 10261 - protein, 9 aa, Homo sapiens
CEANNGLGA

SEQ ID NO: 10262 - protein, 9 aa, Homo sapiens
RSLSAELEI

SEQ ID NO: 10263 - protein, 9 aa, Homo sapiens
EALRGSPPI

SEQ ID NO: 10264 - protein, 9 aa, Homo sapiens
QQPESSANI

SEQ ID NO: 10265 - protein, 9 aa, Homo sapiens
RIPVSRPVL

SEQ ID NO: 10266 - protein, 9 aa, Homo sapiens
KVVNIPVRI

SEQ ID NO: 10267 - protein, 9 aa, Homo sapiens
RDLMTAGVL

SEQ ID NO: 10268 - protein, 9 aa, Homo sapiens
SKVVNIPVR

SEQ ID NO: 10269 - protein, 9 aa, Homo sapiens
TLLENKDSQ

SEQ ID NO: 10270 - protein, 9 aa, Homo sapiens
VILGNSSAP

SEQ ID NO: 10271 - protein, 9 aa, Homo sapiens
YSCEANNGL

SEQ ID NO: 10272 - protein, 9 aa, Homo sapiens
SGGGASFNL

SEQ ID NO: 10273 - protein, 9 aa, Homo sapiens
SSANIRTLL

SEQ ID NO: 10274 - protein, 9 aa, Homo sapiens
VLWGLFGVL

SEQ ID NO: 10275 - protein, 9 aa, Homo sapiens
LGFTGVALL

SEQ ID NO: 10276 - protein, 9 aa, Homo sapiens
GAQAAVGDL

SEQ ID NO: 10277 - protein, 9 aa, Homo sapiens
GGASFNLSL

SEQ ID NO: 10278 - protein, 9 aa, Homo sapiens
SSANIRTLL

SEQ ID NO: 10279 - protein, 9 aa, Homo sapiens
ESSANIRTL

SEQ ID NO: 10280 - protein, 9 aa, Homo sapiens
AAVGDLLEL

SEQ ID NO: 10281 - protein, 9 aa, Homo sapiens
GASFNLSLT

SEQ ID NO: 10282 - protein, 9 aa, Homo sapiens
TLLENKDSQ

SEQ ID NO: 10283 - protein, 9 aa, Homo sapiens
RSLSAELEI

SEQ ID NO: 10284 - protein, 9 aa, Homo sapiens
AQAAVGDLL

SEQ ID NO: 10285 - protein, 9 aa, Homo sapiens
YSCEANNGL

SEQ ID NO: 10286 - protein, 9 aa, Homo sapiens
GVALLLYAL

SEQ ID NO: 10287 - protein, 9 aa, Homo sapiens
GAQAAVGDL

SEQ ID NO: 10288 - protein, 9 aa, Homo sapiens
SGGGASFNL

SEQ ID NO: 10289 - protein, 9 aa, Homo sapiens
TQRSLSAEL

SEQ ID NO: 10290 - protein, 9 aa, Homo sapiens
VVYSQVWSM

SEQ ID NO: 10291 - protein, 9 aa, Homo sapiens
ASRPNPQEF

SEQ ID NO: 10292 - protein, 9 aa, Homo sapiens
QQPESSANI

SEQ ID NO: 10293 - protein, 9 aa, Homo sapiens
PVYVNVGSV

SEQ ID NO: 10294 - protein, 9 aa, Homo sapiens
GGASFNLSL

SEQ ID NO: 10295 - protein, 9 aa, Homo sapiens
LGFTGVALL

SEQ ID NO: 10296 - protein, 9 aa, Homo sapiens
RIPVSRPVL

SEQ ID NO: 10297 - protein, 9 aa, Homo sapiens
KVVNIPVRI

SEQ ID NO: 10298 - protein, 9 aa, Homo sapiens
SGGGASFNL

SEQ ID NO: 10299 - protein, 9 aa, Homo sapiens
MGKKTQRSL

SEQ ID NO: 10300 - protein, 9 aa, Homo sapiens
GGASFNLSL

SEQ ID NO: 10301 - protein, 9 aa, Homo sapiens
LGFTGVALL

SEQ ID NO: 10302 - protein, 9 aa, Homo sapiens
QQPESSANI

SEQ ID NO: 10303 - protein, 9 aa, Homo sapiens
NIPVRIPVS

SEQ ID NO: 10304 - protein, 9 aa, Homo sapiens
LGAQCSEAV

SEQ ID NO: 10305 - protein, 9 aa, Homo sapiens
FGVLGFTGV

SEQ ID NO: 10306 - protein, 9 aa, Homo sapiens
VGSVDVDVV

SEQ ID NO: 10307 - protein, 9 aa, Homo sapiens
WGLFGVLGF

SEQ ID NO: 10308 - protein, 9 aa, Homo sapiens
HVPIQSKVV

SEQ ID NO: 10309 - protein, 9 aa, Homo sapiens
RIPVSRPVL

SEQ ID NO: 10310 - protein, 9 aa, Homo sapiens
DGYRRDLMT

SEQ ID NO: 10311 - protein, 9 aa, Homo sapiens
RSPGAQAAV

SEQ ID NO: 10312 - protein, 9 aa, Homo sapiens
GSPPILYQF

SEQ ID NO: 10313 - protein, 9 aa, Homo sapiens
SGPDGYRRD

SEQ ID NO: 10314 - protein, 9 aa, Homo sapiens
GAQAAVGDL

SEQ ID NO: 10315 - protein, 9 aa, Homo sapiens
SRPNPQEFT

SEQ ID NO: 10316 - protein, 9 aa, Homo sapiens
SGNYSCEAN

SEQ ID NO: 10317 - protein, 9 aa, Homo sapiens
SPPILYQFY

SEQ ID NO: 10318 - protein, 9 aa, Homo sapiens
LLYALFHKI

SEQ ID NO: 10319 - protein, 9 aa, Homo sapiens
VLWGLFGVL

SEQ ID NO: 10320 - protein, 9 aa, Homo sapiens
DSQVIYSSV

SEQ ID NO: 10321 - protein, 9 aa, Homo sapiens
ELQPVYVNV

SEQ ID NO: 10322 - protein, 9 aa, Homo sapiens
VVYSQVWSM

SEQ ID NO: 10323 - protein, 9 aa, Homo sapiens
LGFTGVALL

SEQ ID NO: 10324 - protein, 9 aa, Homo sapiens
GAQAAVGDL

SEQ ID NO: 10325 - protein, 9 aa, Homo sapiens
DAGKYYCRA

SEQ ID NO: 10326 - protein, 9 aa, Homo sapiens
SPPILYQFY

SEQ ID NO: 10327 - protein, 9 aa, Homo sapiens
TYSSPTPDM

SEQ ID NO: 10328 - protein, 9 aa, Homo sapiens
SGGGASFNL

SEQ ID NO: 10329 - protein, 9 aa, Homo sapiens
YSCEANNGL

SEQ ID NO: 10330 - protein, 9 aa, Homo sapiens
GGGASFNLS

SEQ ID NO: 10331 - protein, 9 aa, Homo sapiens
FGVLGFTGV

SEQ ID NO: 10332 - protein, 9 aa, Homo sapiens
GGASFNLSL

SEQ ID NO: 10333 - protein, 9 aa, Homo sapiens
QQPESSANI

SEQ ID NO: 10334 - protein, 9 aa, Homo sapiens
AAVGDLLEL

SEQ ID NO: 10335 - protein, 9 aa, Homo sapiens
SPTPDMEEL

SEQ ID NO: 10336 - protein, 9 aa, Homo sapiens
AQAAVGDLL

SEQ ID NO: 10337 - protein, 9 aa, Homo sapiens
RDLMTAGVL

SEQ ID NO: 10338 - protein, 9 aa, Homo sapiens
QFYHEDVTL

SEQ ID NO: 10339 - protein, 9 aa, Homo sapiens
GFTGVALLL

SEQ ID NO: 10340 - protein, 9 aa, Homo sapiens
LYQFYHEDV

SEQ ID NO: 10341 - protein, 9 aa, Homo sapiens
TYSSPTPDM

SEQ ID NO: 10342 - protein, 9 aa, Homo sapiens
KVVNIPVRI

SEQ ID NO: 10343 - protein, 9 aa, Homo sapiens
AAVGDLLEL

SEQ ID NO: 10344 - protein, 9 aa, Homo sapiens
EALRGSPPI

SEQ ID NO: 10345 - protein, 9 aa, Homo sapiens
RSLSAELEI

SEQ ID NO: 10346 - protein, 9 aa, Homo sapiens
AQAAVGDLL

SEQ ID NO: 10347 - protein, 9 aa, Homo sapiens
SSANIRTLL

SEQ ID NO: 10348 - protein, 9 aa, Homo sapiens
QQPESSANI

SEQ ID NO: 10349 - protein, 9 aa, Homo sapiens
LLYALFHKI

SEQ ID NO: 10350 - protein, 9 aa, Homo sapiens
GYRRDLMTA

SEQ ID NO: 10351 - protein, 9 aa, Homo sapiens
CSEAVPVSI

SEQ ID NO: 10352 - protein, 9 aa, Homo sapiens
SPTPDMEEL

SEQ ID NO: 10353 - protein, 9 aa, Homo sapiens
ALRGSPPIL

SEQ ID NO: 10354 - protein, 9 aa, Homo sapiens
RADNGHVPI

SEQ ID NO: 10355 - protein, 9 aa, Homo sapiens
YSCEANNGL

SEQ ID NO: 10356 - protein, 9 aa, Homo sapiens
VLWGLFGVL

SEQ ID NO: 10357 - protein, 9 aa, Homo sapiens
ESSANIRTL

SEQ ID NO: 10358 - protein, 9 aa, Homo sapiens
LENKDSQVI

SEQ ID NO: 10359 - protein, 9 aa, Homo sapiens
MEELQPVYV

SEQ ID NO: 10360 - protein, 9 aa, Homo sapiens
AEHSGNYSC

SEQ ID NO: 10361 - protein, 9 aa, Homo sapiens
EELQPVYVN

SEQ ID NO: 10362 - protein, 9 aa, Homo sapiens
EALRGSPPI

SEQ ID NO: 10363 - protein, 9 aa, Homo sapiens
QEFTYSSPT

SEQ ID NO: 10364 - protein, 9 aa, Homo sapiens
SEAVPVSIS

SEQ ID NO: 10365 - protein, 9 aa, Homo sapiens
LLYALFHKI

SEQ ID NO: 10366 - protein, 9 aa, Homo sapiens
CEANNGLGA

SEQ ID NO: 10367 - protein, 9 aa, Homo sapiens
HEDVTLGNS

SEQ ID NO: 10368 - protein, 9 aa, Homo sapiens
CSEAVPVSI

SEQ ID NO: 10369 - protein, 9 aa, Homo sapiens
LEIPAVKES

SEQ ID NO: 10370 - protein, 9 aa, Homo sapiens
EDVTLGNSS

SEQ ID NO: 10371 - protein, 9 aa, Homo sapiens
RSLSAELEI

SEQ ID NO: 10372 - protein, 9 aa, Homo sapiens
RADNGHVPI

SEQ ID NO: 10373 - protein, 9 aa, Homo sapiens
QQPESSANI

SEQ ID NO: 10374 - protein, 9 aa, Homo sapiens
KVVNIPVRI

SEQ ID NO: 10375 - protein, 9 aa, Homo sapiens
KESDAGKYY

SEQ ID NO: 10376 - protein, 9 aa, Homo sapiens
VDVVYSQVW

SEQ ID NO: 10377 - protein, 9 aa, Homo sapiens
LELHCEALR

SEQ ID NO: 10378 - protein, 9 aa, Homo sapiens
LENKDSQVI

SEQ ID NO: 10379 - protein, 9 aa, Homo sapiens
MEELQPVYV

SEQ ID NO: 10380 - protein, 9 aa, Homo sapiens
AEHSGNYSC

SEQ ID NO: 10381 - protein, 9 aa, Homo sapiens
EELQPVYVN

SEQ ID NO: 10382 - protein, 9 aa, Homo sapiens
EALRGSPPI

SEQ ID NO: 10383 - protein, 9 aa, Homo sapiens
QEFTYSSPT

SEQ ID NO: 10384 - protein, 9 aa, Homo sapiens
SEAVPVSIS

SEQ ID NO: 10385 - protein, 9 aa, Homo sapiens
LLYALFHKI

SEQ ID NO: 10386 - protein, 9 aa, Homo sapiens
CEANNGLGA

SEQ ID NO: 10387 - protein, 9 aa, Homo sapiens
HEDVTLGNS

SEQ ID NO: 10388 - protein, 9 aa, Homo sapiens
CSEAVPVSI

SEQ ID NO: 10389 - protein, 9 aa, Homo sapiens
LEIPAVKES

SEQ ID NO: 10390 - protein, 9 aa, Homo sapiens
EDVTLGNSS

SEQ ID NO: 10391 - protein, 9 aa, Homo sapiens
RSLSAELEI

SEQ ID NO: 10392 - protein, 9 aa, Homo sapiens
RADNGHVPI

SEQ ID NO: 10393 - protein, 9 aa, Homo sapiens
QQPESSANI

SEQ ID NO: 10394 - protein, 9 aa, Homo sapiens
KVVNIPVRI

SEQ ID NO: 10395 - protein, 9 aa, Homo sapiens
KESDAGKYY

SEQ ID NO: 10396 - protein, 9 aa, Homo sapiens
VDVVYSQVW

SEQ ID NO: 10397 - protein, 9 aa, Homo sapiens
LELHCEALR

SEQ ID NO: 10398 - protein, 9 aa, Homo sapiens
APSGGGASF

SEQ ID NO: 10399 - protein, 9 aa, Homo sapiens
SPTPDMEEL

SEQ ID NO: 10400 - protein, 9 aa, Homo sapiens
GSPPILYQF

SEQ ID NO: 10401 - protein, 9 aa, Homo sapiens
SPPILYQFY

SEQ ID NO: 10402 - protein, 9 aa, Homo sapiens
RPNPQEFTY

SEQ ID NO: 10403 - protein, 9 aa, Homo sapiens
NPQEFTYSS

SEQ ID NO: 10404 - protein, 9 aa, Homo sapiens
GPDGYRRDL

SEQ ID NO: 10405 - protein, 9 aa, Homo sapiens
IPVSRPVLT

SEQ ID NO: 10406 - protein, 9 aa, Homo sapiens
VPIQSKVVN

SEQ ID NO: 10407 - protein, 8 aa, Homo sapiens
PVYVNVGS

SEQ ID NO: 10408 - protein, 9 aa, Homo sapiens
IPAVKESDA

SEQ ID NO: 10409 - protein, 9 aa, Homo sapiens
SSANIRTLL

SEQ ID NO: 10410 - protein, 9 aa, Homo sapiens
ESSANIRTL

SEQ ID NO: 10411 - protein, 9 aa, Homo sapiens
YSCEANNGL

SEQ ID NO: 10412 - protein, 9 aa, Homo sapiens
DSQVIYSSV

SEQ ID NO: 10413 - protein, 9 aa, Homo sapiens
RSPGAQAAV

SEQ ID NO: 10414 - protein, 9 aa, Homo sapiens
ASRPNPQEF

SEQ ID NO: 10415 - protein, 9 aa, Homo sapiens
WGLFGVLGF

SEQ ID NO: 10416 - protein, 9 aa, Homo sapiens
VSISGPDGY

SEQ ID NO: 10417 - protein, 9 aa, Homo sapiens
TAGVLWGLF

SEQ ID NO: 10418 - protein, 9 aa, Homo sapiens
SKVVNIPVR

SEQ ID NO: 10419 - protein, 9 aa, Homo sapiens
VKESDAGKY

SEQ ID NO: 10420 - protein, 9 aa, Homo sapiens
NKDSQVIYS

SEQ ID NO: 10421 - protein, 9 aa, Homo sapiens
KKTQRSLSA

SEQ ID NO: 10422 - protein, 9 aa, Homo sapiens
HKISGESSA

SEQ ID NO: 10423 - protein, 9 aa, Homo sapiens
GKYYCRADN

SEQ ID NO: 10424 - protein, 9 aa, Homo sapiens
GKKTQRSLS

SEQ ID NO: 10425 - protein, 9 aa, Homo sapiens
TNEPRGASR

SEQ ID NO: 10426 - protein, 9 aa, Homo sapiens
ESSATNEPR

SEQ ID NO: 10427 - protein, 9 aa, Homo sapiens
VSRPVLTLR

SEQ ID NO: 10428 - protein, 9 aa, Homo sapiens
SISGPDGYR

SEQ ID NO: 10429 - protein, 9 aa, Homo sapiens
IPVRIPVSR

SEQ ID NO: 10430 - protein, 9 aa, Homo sapiens
ISGPDGYRR

SEQ ID NO: 10431 - protein, 9 aa, Homo sapiens
QPESSANIR

SEQ ID NO: 10432 - protein, 9 aa, Homo sapiens
LLLYALFHK

SEQ ID NO: 10433 - protein, 9 aa, Homo sapiens
DMEELQPVY

SEQ ID NO: 10434 - protein, 9 aa, Homo sapiens
SQVIYSSVK

SEQ ID NO: 10435 - protein, 9 aa, Homo sapiens
VLWGLFGVL

SEQ ID NO: 10436 - protein, 9 aa, Homo sapiens
VLGFTGVAL

SEQ ID NO: 10437 - protein, 9 aa, Homo sapiens
LLELHCEAL

SEQ ID NO: 10438 - protein, 30 aa, Homo sapiens
MGKKTQRSLSAELEIPAVKESDAGKYYCRA

SEQ ID NO: 10439 - protein, 30 aa, Homo sapiens
PAVKESDAGKYYCRADNGHVPIQSKVVNIP

SEQ ID NO: 10440 - protein, 30 aa, Homo sapiens
DNGHVPIQSKVVNIPVRIPVSRPVLTLRSP

SEQ ID NO: 10441 - protein, 30 aa, Homo sapiens
VRIPVSRPVLTLRSPGAQAAVGDLLELHCE

SEQ ID NO: 10442 - protein, 30 aa, Homo sapiens
GAQAAVGDLLELHCEALRGSPPILYQFYHE

SEQ ID NO: 10443 - protein, 30 aa, Homo sapiens
ALRGSPPILYQFYHEDVTLGNSSAPSGGGA

SEQ ID NO: 10444 - protein, 30 aa, Homo sapiens
DVTLGNSSAPSGGGASFNLSLTAEHSGNYS

SEQ ID NO: 10445 - protein, 30 aa, Homo sapiens
SFNLSLTAEHSGNYSCEANNGLGAQCSEAV

SEQ ID NO: 10446 - protein, 30 aa, Homo sapiens
CEANNGLGAQCSEAVPVSISGPDGYRRDLM

SEQ ID NO: 10447 - protein, 30 aa, Homo sapiens
PVSISGPDGYRRDLMTAGVLWGLFGVLGFT

SEQ ID NO: 10448 - protein, 30 aa, Homo sapiens
TAGVLWGLFGVLGFTGVALLLYALFHKISG

SEQ ID NO: 10449 - protein, 30 aa, Homo sapiens
GVALLLYALFHKISGESSATNEPRGASRPN

SEQ ID NO: 10450 - protein, 30 aa, Homo sapiens
ESSATNEPRGASRPNPQEFTYSSPTPDMEE

SEQ ID NO: 10451 - protein, 30 aa, Homo sapiens
PQEFTYSSPTPDMEELQPVYVNVGSVDVDV

SEQ ID NO: 10452 - protein, 30 aa, Homo sapiens
LQPVYVNVGSVDVDVVYSQVWSMQQPESSA

SEQ ID NO: 10453 - protein, 30 aa, Homo sapiens
VYSQVWSMQQPESSANIRTLLENKDSQVIY

SEQ ID NO: 10454 - protein, 21 aa, Homo sapiens
NIRTLLENKDSQVIYSSVKKS

SEQ ID NO: 10455 - protein, 39 aa, Homo sapiens
KVVNIPVRIPVSRPVLTLRSPGAQAAVGDLLELHCEALR

SEQ ID NO: 10456 - protein, 24 aa, Homo sapiens
LGAQCSEAVPVSISGPDGYRRDLM

SEQ ID NO: 10457 - protein, 16 aa, Homo sapiens
ELQPVYVNVGSVDVDV

SEQ ID NO: 10458 - protein, 38 aa, Homo sapiens
GPDGYRRDLMTAGVLWGLFGVLGFTGVALLLYALFHKI

SEQ ID NO: 10459 - protein, 515 aa, Homo sapiens
MLLWASLLAFAPVCGQSAAAHKPVISVHPPWTTFFKGERVTLTCNGFQFYATEKTTWYHRHYWGEKLTLTPGNTLEVRESGLYRCQARGSPRSNPVRLLFSSDSLILQAPYSVFEGDTLVLRCHRRRKEKLTAVKYTWNGNILSISNKSWDLLIPQASSNNNGNYRCIGYGDENDVFRSNFKIIKIQELFPHPELKATDSQPTEGNSVNLSCETQLPPERSDTPLHFNFFRDGEVILSDWSTYPELQLPTVWRENSGSYWCGAETVRGNIHKHSPSLQIHVQRIPVSGVLLETQPSGGQAVEGEMLVLVCSVAEGTGDTTFSWHREDMQESLGRKTQRSLRAELELPAIRQSHAGGYYCTADNSYGPVQSMVLNVTVRETPGNRDGLVAAGATGGLLSALLLAVALLFHCWRRRKSGVGFLGDETRLPPAPGPGESSHSICPAQVELQSLYVDVHPKKGDLVYSEIQTTQLGEEEEANTSRTLLEDKDVSVVYSEVKTQHPDNSAGKISSKDEES

SEQ ID NO: 10460 - protein, 759 aa, Homo sapiens
MLLWVILLVLAPVSGQFARTPRPIIFLQPPWTTVFQGERVTLTCKGFRFYSPQKTKWYHRYLGKEILRETPDNILEVQESGEYRCQAQGSPLSSPVHLDFSSASLILQAPLSVFEGDSVVLRCRAKAEVTLNNTIYKNDNVLAFLNKRTDFHIPHACLKDNGAYRCTGYKESCCPVSSNTVKIQVQEPFTRPVLRASSFQPISGNPVTLTCETQLSLERSDVPLRFRFFRDDQTLGLGWSLSPNFQITAMWSKDSGFYWCKAATMPHSVISDSPRSWIQVQIPASHPVLTLSPEKALNFEGTKVTLHCETQEDSLRTLYRFYHEGVPLRHKSVRCERGASISFSLTTENSGNYYCTADNGLGAKPSKAVSLSVTVPVSHPVLNLSSPEDLIFEGAKVTLHCEAQRGSLPILYQFHHEDAALERRSANSAGGVAISFSLTAEHSGNYYCTADNGFGPQRSKAVSLSITVPVSHPVLTLSSAEALTFEGATVTLHCEVQRGSPQILYQFYHEDMPLWSSSTPSVGRVSFSFSLTEGHSGNYYCTADNGFGPQRSEVVSLFVTVPVSRPILTLRVPRAQAVVGDLLELHCEAPRGSPPILYWFYHEDVTLGSSSAPSGGEASFNLSLTAEHSGNYSCEANNGLVAQHSDTISLSVIVPVSRPILTFRAPRAQAVVGDLLELHCEALRGSSPILYWFYHEDVTLGKISAPSGGGASFNLSLTTEHSGIYSCEADNGLEAQRSEMVTLKVAGEWALPTSSTSEN

SEQ ID NO: 10461 - protein, 592 aa, Homo sapiens
MLLWVILLVLAPVSGQFARTPRPIIFLQPPWTTVFQGERVTLTCKGFRFYSPQKTKWYHRYLGKEILRETPDNILEVQESGEYRCQAQGSPLSSPVHLDFSSASLILQAPLSVFEGDSVVLRCRAKAEVTLNNTIYKNDNVLAFLNKRTDFHIPHACLKDNGAYRCTGYKESCCPVSSNTVKIQVQEPFTRPVLRASSFQPISGNPVTLTCETQLSLERSDVPLRFRFFRDDQTLGLGWSLSPNFQITAMWSKDSGFYWCKAATMPHSVISDSPRSWIQVQIPASHPVLTLSPEKALNFEGTKVTLHCETQEDSLRTLYRFYHEGVPLRHKSVRCERGASISFSLTTENSGNYYCTADNGLGAKPSKAVSLSVTVPVSHPVLNLSSPEDLIFEGAKVTLHCEAQRGSLPILYQFHHEDAALERRSANSAGGVAISFSLTAEHSGNYYCTADNGFGPQRSKAVSLSITVPVSHPVLTLSSAEALTFEGATVTLHCEVQRGSPQILYQFYHEDMPLWSSSTPSVGRVSFSFSLTEGHSGNYYCTADNGFGPQRSEVVSLFVTGKCWVLASHPPLAEFSLTHSFKNLFALSSFLP

SEQ ID NO: 10462 - protein, 977 aa, Homo sapiens
MLLWVILLVLAPVSGQFARTPRPIIFLQPPWTTVFQGERVTLTCKGFRFYSPQKTKWYHRYLGKEILRETPDNILEVQESGEYRCQAQGSPLSSPVHLDFSSASLILQAPLSVFEGDSVVLRCRAKAEVTLNNTIYKNDNVLAFLNKRTDFHIPHACLKDNGAYRCTGYKESCCPVSSNTVKIQVQEPFTRPVLRASSFQPISGNPVTLTCETQLSLERSDVPLRFRFFRDDQTLGLGWSLSPNFQITAMWSKDSGFYWCKAATMPHSVISDSPRSWIQVQIPASHPVLTLSPEKALNFEGTKVTLHCETQEDSLRTLYRFYHEGVPLRHKSVRCERGASISFSLTTENSGNYYCTADNGLGAKPSKAVSLSVTVPVSHPVLNLSSPEDLIFEGAKVTLHCEAQRGSLPILYQFHHEDAALERRSANSAGGVAISFSLTAEHSGNYYCTADNGFGPQRSKAVSLSITVPVSHPVLTLSSAEALTFEGATVTLHCEVQRGSPQILYQFYHEDMPLWSSSTPSVGRVSFSFSLTEGHSGNYYCTADNGFGPQRSEVVSLFVTVPVSRPILTLRVPRAQAVVGDLLELHCEAPRGSPPILYWFYHEDVTLGSSSAPSGGEASFNLSLTAEHSGNYSCEANNGLVAQHSDTISLSVIVPVSRPILTFRAPRAQAVVGDLLELHCEALRGSSPILYWFYHEDVTLGKISAPSGGGASFNLSLTTEHSGIYSCEADNGLEAQRSEMVTLKVAVPVSRPVLTLRAPGTHAAVGDLLELHCEALRGSPLILYRFFHEDVTLGNRSSPSGGASLNLSLTAEHSGNYSCEADNGLGAQRSETVTLYITGLTANRSGPFATGVAGGLLSIAGLAAGALLLYCWLSRKAGRKPASDPARSPSDSDSQEPTYHNVPAWEELQPVYTNANPRGENVVYSEVRIIQEKKKHAVASDPRHLRNKGSPIIYSEVKVASTPVSGSLFLASSAPHR

SEQ ID NO: 10463 - protein, 734 aa, Homo sapiens
MLLWLLLLILTPGREQSGVAPKAVLLLNPPWSTAFKGEKVALICSSISHSLAQGDTYWYHDEKLLKIKHDKIQITEPGNYQCKTRGSSLSDAVHVEFSPDWLILQALHPVFEGDNVILRCQGKDNKNTHQKVYYKDGKQLPNSYNLEKITVNSVSRDNSKYHCTAYRKFYILDIEVTSKPLNIQVQELFLHPVLRASSSTPIEGSPMTLTCETQLSPQRPDVQLQFSLFRDSQTLGLGWSRSPRLQIPAMWTEDSGSYWCEVETVTHSIKKRSLRSQIRVQRVPVSNVNLEIRPTGGQLIEGENMVLICSVAQGSGTVTFSWHKEGRVRSLGRKTQRSLLAELHVLTVKESDAGRYYCAADNVHSPILSTWIRVTVRIPVSHPVLTFRAPRAHTVVGDLLELHCESLRGSPPILYRFYHEDVTLGNSSAPSGGGASFNLSLTAEHSGNYSCDADNGLGAQHSHGVSLRVTVPVSRPVLTLRAPGAQAVVGDLLELHCESLRGSFPILYWFYHEDDTLGNISAHSGGGASFNLSLTTEHSGNYSCEADNGLGAQHSKVVTLNVTGTSRNRTGLTAAGITGLVLSILVLAAAAALLHYARARRKPGGLSATGTSSHSPSECQEPSSSRPSRIDPQEPTHSKPLAPMELEPMYSNVNPGDSNPIYSQIWSIQHTKENSANCPMMHQEHEELTVLYSELKKTHPDDSAGEASSRGRAHEEDDEENYENVPRVLLASDH

SEQ ID NO: 10464 - protein, 508 aa, Homo sapiens
MLLWSLLVIFDAVTEQADSLTLVAPSSVFEGDSIVLKCQGEQNWKIQKMAYHKDNKELSVFKKFSDFLIQSAVLSDSGNYFCSTKGQLFLWDKTSNIVKIKVQELFQRPVLTASSFQPIEGGPVSLKCETRLSPQRLDVQLQFCFFRENQVLGSGWSSSPELQISAVWSEDTGSYWCKAETVTHRIRKQSLQSQIHVQRIPISNVSLEIRAPGGQVTEGQKLILLCSVAGGTGNVTFSWYREATGTSMGKKTQRSLSAELEIPAVKESDAGKYYCRADNGHVPIQSKVVNIPVRIPVSRPVLTLRSPGAQAAVGDLLELHCEALRGSPPILYQFYHEDVTLGNSSAPSGGGASFNLSLTAEHSGNYSCEANNGLGAQCSEAVPVSISGPDGYRRDLMTAGVLWGLFGVLGFTGVALLLYALFHKISGESSATNEPRGASRPNPQEFTYSSPTPDMEELQPVYVNVGSVDVDVVYSQVWSMQQPESSANIRTLLENKDSQVIYSSVKKS

SEQ ID NO: 10465 - protein, 429 aa, Homo sapiens
MLPRLLLLICAPLCEPAELFLIASPSHPTEGSPVTLTCKMPFLQSSDAQFQFCFFRDTRALGPGWSSSPKLQIAAMWKEDTGSYWCEAQTMASKVLRSRRSQINVHRVPVADVSLETQPPGGQVMEGDRLVLICSVAMGTGDITFLWYKGAVGLNLQSKTQRSLTAEYEIPSVRESDAEQYYCVAENGYGPSPSGLVSITVRIPVSRPILMLRAPRAQAAVEDVLELHCEALRGSPPILYWFYHEDITLGSRSAPSGGGASFNLSLTEEHSGNYSCEANNGLGAQRSEAVTLNFTVPTGARSNHLTSGVIEGLLSTLGPATVALLFCYGLKRKIGRRSARDPLRSLPSPLPQEFTYLNSPTPGQLQPIYENVNVVSGDEVYSLAYYNQPEQESVAAETLGTHMEDKVSLDIYSRLRKANITDVDYEDAM

SEQ ID NO: 10466 - protein, 266 aa, Homo sapiens
  variant (1)...(266): Xaa = Any amino acid
DNVHSPILSTWIRVTVRIPVSHPVLTFRAPRAHTVVGDLLELHCESLRGSPPILYRFYHEDVTLGNSSAPSGGGASFNLSLTAEHSGNYSCDADNGLGAQHSHGVSLRVTVPVSRPVLTLRAPGAQAVVGDPLELHCESLRGSFPILYWFYHEDDTLGNISAHSGGGASFNLSLTTEHSGNYSCEADNGLGAQHSKVVTLNVTGTSRNRTGLTXAGITGLVXXIXVLXAAAALLHYARARRKPGGLSATGTSSHSPSECQEPSSSR

SEQ ID NO: 10467 - DNA, 1500 bp, Artificial Sequence
  Ra12-Ly1464 N-terminal fusion, plasmid construct pCRX2 insert
atgcatcaccatcaccatcacacggccgcgtccgataacttccagctgtcccagggtgggcagggattcgccattccgatcgggcaggcgatggcgatcgcgggccagatcaagcttcccaccgttcatatcgggcctaccgccttcctcggcttgggtgttgtcgacaacaacggcaacggcgcacgagtccaacgcgtggtcgggagcgctccggcggcaagtctcggcatctccaccggcgacgtgatcaccgcggtcgacggcgctccgatcaactcggccaccgcgatggcggacgcgcttaacgggcatcatcccggtgacgtcatctcggtgacctggcaaaccaagtcgggcggcacgcgtacagggaacgtgacattggccgagggacccccggccgaattctccatggacatgaagctgggctgtgtcctcatggcctgggccctctacctttcccttggtgtgctctgggtggcccagatgctactggctgccagttttgagacgctgcagtgtgagggacctgtctgcactgaggagagcagctgccacacggaggatgacttgactgatgcaagggaagctggcttccaggtcaaggcctacactttcagtgaacccttccacctgattgtgtcctatgactggctgatcctccaaggtccagccaagccagtttttgaaggggacctgctggttctgcgctgccaggcctggcaagactggccactgactcaggtgaccttctaccgagatggctcagctctgggtccccccgggcctaacagggaattctccatcaccgtggtacaaaaggcagacagcgggcactaccactgcagtggcatcttccagagccctggtcctgggatcccagaaacagcatctgttgtggctatcacagtccaagaactgtttccagcgccaattctcagagctgtaccctcagctgaaccccaagcaggaagccccatgaccctgagttgtcagacaaagttgcccctgcagaggtcagctgcccgcctcctcttctccttctacaaggatggaaggatagtgcaaagcagggggctctcctcagaattccagatccccacagcttcagaagatcactccgggtcatactggtgtgaggcagccactgaggacaaccaagtttggaaacagagcccccagctagagatcagagtgcagggtgcttccagctctgctgcacctcccacattgaatccagctcctcagaaatcagctgctccaggaactgctcctgaggaggcccctgggcctctgcctccgccgccaaccccatcttctgaggatccaggcttttcttctcctctggggatgccagatcctcatctgtatcaccagatgggccttcttctcaaacacatgcaggatgtgagagtcctcctcggtcacctgctcatggagttgagggaattatctggccaccggaagcctgggaccacaaaggctactgctgaatag

SEQ ID NO: 10468 - protein, 499 aa, Artificial Sequence [sequence omitted]

SEQ ID NO: 10469 - DNA, 1442 bp, Homo sapiens
gcgtgaggcaccgcggctggcctgagtttcttcttaatactgtatcacaattgtgggctgtcttatgtgttgatatcgattgagctatttgaaataggaatgttaatgggtgtattaaatttttgtaaggatataacaatatctaccttccaaggatgttgtgaggttttccatgattttgtatatgagctaatgttacctttgaggggtggtgtgcattatgttggatgattgtaaattttcagtggaaaatgtaccgtgtcctaaatttaaagacatgaaaaatatcccaagatcatactagatcataatagcaattcctttacaaatgaattatggaggtaactgatctctaacagtttccttcatgttgttttaatgcacaagggcagaggatctgctgacccttggaaccagcgtgagctaaccacgtgctatagacacttcatggtgtcgcacccagggaagtcaaagcgctttgctccctcactgtctgtgagtcctcagccattagtaccccaccccccgctgctccaaaacttgagttatttcaaatgtttctcactgttcatctctccactgaccccactccagaaagcctggagagagtcccaagatgccacccaccttccccaatccctcgccacagatctgtgtctatctcacactctgtaagtgccgctttgcttcttcctctcttgaaaagactgagaacacacattttaacatgttaggaaaatggggcagcctaaaaaatgactgatcccaccgccagtgactcatgtatactccaggctagcagacaaggccctttttggtgggcctgcttctgtgggttcacagaaaccaaattactgtgggttgcaaagaattagcaggtcatttacaaagcagacatcccttcacccagactgtggttttgcatgctcaggttctcagtctatgagctttggtgcaggatcattttggctactggaaaaaccatagcttattttaaatttctggttgccaaagccaccacacgtgtggtctgtggatgaccattgtctgcagaatgacgaggaaggaacagaatgtggtttggggctcagggtggccttcccactgggagggaaggcgggagggagcccttgccctgggttttgacacagcctgtgctcacagcctctcctctcatctgcatttctcagaaatgccctccctgcccagtggtgactttccctcgtcactcctatggagttctacctggagcccagccatgtgtggaactgtgaagtttactcctctgtaaagatggtttaaagaaagtcagcttctgaaatgtaacaatgctaacccttgctggaaccctgtaagaaatagccctgctgatagttttctaggtttatcatgtttgatttttacactgaaaaataaaaaaatcctggtatgtttgaaaaaaa

SEQ ID NO: 10470 - DNA, 1637 bp, Homo sapiens
acctcctgggctcaagcaacgagccatcctcccgtcttagcctcccaactagctgagactacaggcgtgggtcaccacacccagctaatttttgtactttttgtagagacagggtctcaccatgttgcccaggctggtcctgaactcctgggctcaagtaatctgcccacctcagcctcccaaagtgttggggttacaggcgtgaggcaccgcggctggcctgagtttcttcttaatactgtatcacaattgtgggctgtcttatgtgttgatatcgattgagctatttgaaataggaatgttaatgggtgtattaaatttttgtaaggatataacaatatctaccttccaaggatgttgtgaggttttccatgattttgtatatgagctaatgttacctttgaggggtggtgtgcattatgttggatgattgtaaattttcagtggaaaatgtaccgtgtcctaaatttaaagacatgaaaaatatcccaagatcatactagatcataatagcaattcctttacaaatgaattatggaggtaactgatctctaacagtttccttcatgttgttttaatgcacaagggcagaggatctgctgacccttggaaccagcgtgagctaaccacgtgctatagacacttcatggtgtcgcacccagggaagtcaaagcgctttgctccctcactgtctgtgagtcctcagccattagtaccccaccccccgctgctccaaaacttgagttatttcaaatgtttctcactgttcatctctccactgaccccactccagaaagcctggagagagtcccaagatgccacccaccttccccaatccctcgccacagatctgtgtctatctcacactctgtaagtgccgctttgcttcttcctctcttgaaaagactgagaacacacattttaacatgttaggaaaatggggcagcctaaaaaatgactgatcccaccgccagtgactcatgtatactccaggctagcagacaaggccctttttggtgggcctgcttctgtgggttcacagaaaccaaattactgtgggttgcaaagaattagcaggtcatttacaaagcagacatcccttcacccagactgtggttttgcatgctcaggttctcagtctatgagctttggtgcaggatcattttggctactggaaaaaccatagcttattttaaatttctggttgccaaagccaccacacgtgtggtctgtggatgaccattgtctgcagaatgacgaggaaggaacagaatgtggtttggggctcagggtggccttcccactgggagggaaggcgggagggagcccttgccctgggttttgacacagcctgtgctcacagcctctcctctcatctgcatttctcagaaatgccctccctgcccagtggtgactttccctcgtcactcctatggagttctacctggagcccagccatgtgtggaactgtgaagtttactcctctgtaaagatggtttaaagaaagtcagcttctgaaatgtaacaatgctaacccttgctggaaccctgtaagaaatagccctgctgatagttttctaggtttatcatgtttgatttttacactgaaaaataaaaaaatcctggtatgtttgaaa

SEQ ID NO: 10471 - protein, 98 aa, Homo sapiens
MHKGRGSADPWNQRELTTCYRHFMVSHPGKSKRFAPSLSVSPQPLVPHPPLLQNLSYFKCFSLFISPLTPLQKAWRESQDATHLPQSLATDLCLSHTL

SEQ ID NO: 10472 - protein, 59 aa, Homo sapiens
MFLTVHLSTDPTPESLERVPRCHPPSPIPRHRSVSISHSVSAALLLPLLKRLRTHILTC

SEQ ID NO: 10473 - protein, 84 aa, Homo sapiens
MTIVCRMTRKEQNVVWGSGWPSHWEGRREGALALGFDTACAHSLSSHLHFSEMPSLPSGDFPSSLLWSSTWSPAMCGTVKFTPL

SEQ ID NO: 10474 - protein, 66 aa, Homo sapiens [sequence omitted]

SEQ ID NO: 10475 - DNA, 51657 bp, Homo sapiens
  misc_feature (1)...(51657): n = g, a, c or t
gtcttctccctgtgtcttcacgtggtccccgctgtctgtgcgttgtgccctgatctcctcttcttataaggaccccaatcatattggattagagcccatccacaggacctaaatttttcccttaactcttttcctgtttgccccaagaacactcaccagcagctcttgcggctgcagcgtttaccccaaagtaatttggtcacaaaacatctcccttttattattttcactttgctttagtgtatcaactttggaaacaaaagacatcattctacgtataagacatcattctaggtatagcgttctgtctttagtagtggcatttccatttagaaaatatagtaattctcgatcgctgaaaatgtcaaatccgagaaaacatagcattcctatgtgatcattctcaaagagttgttggccaaagattcatttgattaatcctatttttctgaaatagacgattctgatgattgagatgattttgatgttagttctgtttacacataactccaagaacagtttttaaattttactttcacattgaaaatcagtcaggttggtttatgtaaaattaaatgagctctggccaagcacggtggctcatgcctataatcccagcactttgggaggctgaggtggacagatcacttgaggtcaggagtttgacaccagcctgggcagcatggcgaaaccccgtctctacaaaaaatacatatatattagccagatgtggtggtgcatgcctgtggtcccagcttctcaggaagctgaggcaggagaatcatttgaacttgaggggcagaggttgcagtgagccaagattgtgccatggaaccccaacctgggcaacagagcaagactctgtctcaaaaaaaaaaaaaaatgctggcagtgggctgcacttttttttttcctaaacaggaaaagggttaattatttctttaaagaacctagcaccaaatacagtcacattcggaggtactgggggttgggacttgaacatatgaattttggaggggcacaaggcatcccatgacacatgtgggaaccggtataatctctacagagactagaatttagatttaacagcttgaaacagcttcaagttattggtaacatacaaaacaaaaacaattcaaagccctttacattcaaattattgaataaaaaataactatttctacaatgtataaaaggtatgctatgtttattagtcttacttgtagctaatctacttttatgtttccttacagaaaattcttgacattttatgtttccgtgtaagagattgtacagaaggcaaatttttgtgttatgcaataataatactctaatacaaattctgttatgaacttcattggcactatatttaaatgtcatagcaattatttttatgtggtattttcaaataatctagatttcatgcagcattataaaactaactggggctggggacactggctcatgcctgtaatctcaacactttgggaggccaaggcgggcagactgcttaagcccaggagtttgagaccatcctgggcaacatggcaaaaccccgtctctacaaaaaatacaaaacaaaacaaaattagccagacatggtggtgcacgcctgtggtcccagctactcaggaggctgacacaggaggatcacttgaacacgggaggcagaggttgcagtgagccaggattgtgccactgcattccagctgggtgacacagcgagaccctgtctcaaaacaaaacaaaacaaaacaaaaacaaaacagaaaacagtgtgagaagtgttcattacccacccacccccacccccaaagctttccaagctcccgaccccatacagaggcaaaggatgcactgtgcaaagctgcctgcctggccccaaacgtccagtcaaacccaccactgcccttgcatgacttctgacccctccaccttcaatctagaccccacacctatcccaccatcatctcaagccaagggggaccttgaataaaggttttcttcctgtccctgcacctccagacaagagagtgcaatggtttcttagacagatcagatcctgttaaaacatttaacaaggtcaagataacttaaaatagttaccagacaaaaatagatggactagtacatggacagcagctaactgagacatgggatgctacgtttcttattcacacatcagatcttgacatcatattagtaaaggtgtggggcggggacatgccatggccagggtggggtcgcagctggccagactgagctggcccttctgttgagttgaaccttggggatatgcagccgctgtgcaatggtgccacctgatggtactttgtagaataaccactctcctagtttttcttcatctttaagttcctaaagagagactgaaatttcaaattggtttccttgttgtctattattgtcaaatgaaaagtgcaaacgttggtactcacctctcttgatttttatctgtctaaaaaatgaaatctcagctatattcactgatatattatggaaagaacactggacttaagggatttgggttcagatcccattttcggcaacttactagttataggatttggtaaagttactcaacatctgcatgcccattttatgatctggagaatggaaataataggattcttgtgaggattacaggaggtgatatatgcacatctgcgtccataaatcaagcctgggtgttgtggaggtgtgcgtcaccatcatgcattctctgaaggaggctcagccagctctacctttaatggctgggatttacttgtcttttggttcctttccacctgtttgccagcagaggctaaggttgtgatggaggccatctctcagcagatgagttgagaccatcctgggcaacatggtcaggaccacccttgggcctctgtgcagggcagtgcccaccctgatgcctacgctggtcagattgagagcatagacatggggccatgacctccataaacccccacccagtgccacatggcagcccaaggaaccctcttagccctgggttcttcgtctgtaaaacgaggctaacgtaacaaggggagctacttagtaaaccaaaaaaaaaaaaactaaactacaattcgtcttctgggatgttttgttttgttttgttttggagtgttatttggctgctgttttactctatattcccagagacaaatgaagcgtaagaggctgttcttgcattactataaaggaatacctgagactgggtaatttataagaaaagagaagttcttttgtttttggtttgttttgagacagagtttcactcttattgcccaggctggagtgcaatggtgagatcttgactcactgcaacctctgcctcccaggttcaagcaattctcctgcctcagcctcctgagtagctgggattacaggcatgggccaccatgcccggctaatttcgtatttttagtagagacagagtttctccatgttggtcagactggtctcaaactcccaacctcaggggatccgcctgccttggcctcccaaagtgctgggattacgggcatgagccaccgtgcctggctagaaaagaggtttaattggctcacagttctccaggctgtaaggaagcatggccccaacatctgctcatcttctgaggaggcctcaggaagcttatgatcatggcagaaggtgaagggggagcaggcacgccacatggcaaaagcaggaacaagagagacagctggtggtggggggtgccacagactcttcaatgaccaggtctcacaagaattcactcactatgatgaggacagcaccaagccatgagggatcggctcccatgatcccaacacctcccaccagatcccacctccatcactggggatcacaatgcaacctgagatttgggcgaggacaaatatccaaactatatcaagcatcttccttcccctttctcccttcccctcctgattctggggagaagaggctgctgtgtgtttctgaagggctgagtgttctcacccacccccaaccccccaagtaaagaactcttatgtttcaggcccatggggtgtggggagaggtggtcccagaggagcagggcgtgagattggcagctttagttgaagaggctgggatagataggggggcaggggtggtggtctcagcaaatggtgaggagtgagggggaagggtgtccaaggctgctcagggggtggagcatgaatacccagaggctgagcttcaactcatcagcactgctcccggggaccacagtgactgaagagtgaacctctgagcagtgctcagggcgtcctgaggcccggagagccagttctctgaatggtgcaagaccctgtcaggtccacaggaccccagaagccaggaagcacaacaaattggatttccgcccacgctgagtagatgggagctagaaaaccaaagaaggccaggtgtgttggctcacgcctgtaatcccagcacttcgggaggccgaggcgggcggatcacttgaagtcaggcatttgagaccagcctggccaacatggtgaaaccctgtctgtattaaaaatacaaaaattagctgggcatggtggcatgcacctgtaatcccaactacttgggtggctgaggcatgagaatctctgaacctgggaggcagagattgcagtgagctgagattgcaccactgcactccagcctgggcgacagagtgagactctgtcttacaaaaaaaaaaaaagaaaaaagaaacaaagaaacaaagaaaaagaaaatcaatggcccttgcgccagagtgtcttggagggagtccacactgacacgcccacggggggagctgctgaaagcattccccagtccagtgctgccccgtgagcaccgccacctgtttcccgctttcctggccaccgtacatacatttgttcatgtttatagactctgaatatagagaccccacacaagaagagaaaggctcagaaaaacaatgttatgacctgcttcctgaggcaccctgcctgcaggaagtgcttttcacagcaagaaattctgactccaggacccatatttttagcaggaacatggtcagtcaacacacatcctctaggcctgccctggaccagatgaccaggaggaagcagccgtgagtcacagggagaaagccggtggctctgacagggacgcctgctgctccgccggggaacagctttcccctggtttcagttagaaaggtcaggggacgcctgaccacacaaggctcacgggaactgtggagggcggcccctcaggccacaatcagcaggtgcccaccatggcttctctcctggcaggtgaggacttcagtttttctccatggcttggctcacctgttctcttattctcagagccataatcaccctcctcctgccccagcctggagctctctgagaccctccactatagtaaccagcacagcctagagagggtaaatcctccggtgcccccaacatcccaccttcatgttgcagcgaggcccaaaatgtcccagaagaaaaacaaactccatcgcacaccaaaaacccaccaaaaaacgtgaaatcaccttcataatttgggaagtataaacatagttctatttgttctgtaacgtatttttcatgatcaggaaatgaagacaaagaaaggctttgggaattgttttatggagaggacaccatcttccaggtcctgccagctcagggctcccatctttcagcccctccagagctgagcccggagggctggggccgccctctccctgctcctgagccacagaagcccaaggctggccctgaagacctaacagcctcaggcatttgcagcccccttggcctaaaagggctgttaagagaggtgcagacgtgggccctgcccattcaccctcagaggaggtcgcgacttccaccccagcaagagtacccctaggactgtggagtgcagaggacagcgaccgttgactaggtacctggtgcagggtcttgccctccctccctgtagcccgatatgggaagggccacagtccaagtccatgttcatgctgctcctccaggaggccttcccaaacatcttctcgatgccgagtaactcacagatcccatatagaaatagaccttggaagggatctctcttcttgcaaatgaagaaactgaagaccagagatgtacctcaaatcacacagcgagtaaccggcagagccaggaggctcctctgcccccaggccagagagggcttgcaatctggcttccgagcagtggttcccaactcccgggccattacaatcacctgggatccccaccagtggaatgactctctgggggtggtgcttggaaggctggtggtggtgaaagttcccctggtgattctcatgcagccagattggagaaccctttagattcaggcatggaggttccacctggttccagatcacatggccatttggtctcaagaaagtcacagccctcctgagtctcactggcaaattgctacgtaataacacgcatcttcttgataaggaaccgatataaggatccagaccctggacctcctcaggaaaacagagcacgcattataagatacaatcgaataggagaagtttttcataagcttggagggctatggttattggattcaaaagaatagttttctctcttgtcacataccaatttgaaaagtagtaatacccattctttaacagaagtgtatttggggccagttgcggtggctcacacctgtaacatcaatactttgggaggccaaggtgggtggatcacttgaggtcaggagtttgagaccagcctgtccatcacagtgaaactccgtctttactaaaaaaacaaaaattagctgggtgtggtggcgcatgcctgtagtcccagctactagggaggctgaggcaggagaatcacttaaacctgggaggtgggggttgcagtaagctgagatcgtgccactgcactccagcctcggcgacaggagggcaaccctgtctcaaaaaaaaaaaaaaaaaaaaaagcctatttggaatcagtcccctcccacggggacctctttcaggaggtcaggccacagcaccgtggcaggcatgtggtagcccctccataaatggctgagcgagtgcagttgaagtgggagtctggtgttctttgaatacatcctgctgcattggaagaagcctgtgcaggactagacagttggccttctgtggcaggctcttgcctccaggccagttgagtgagtgcagatgtcctgagagaccagcagtgcagccacaccccatgggactgtgaggcgctctcacagtgaagaccaagcgcaggtagcactggctttgtggttcggagaaaagtcgacactcatttccttggggaaaaaaagtatttatcaaaggaagtctttccctcttggcaaaaaaaacagagacaagtaatttcctccagcagtctgagctgggatttgggggcaaataaccattaaacagagacacctgagggtgcacagatggtcactgtggcaaaggtcggctgaagaataataggtaatagggagccactgtgggttcttgagtggaggaggggcatgataaagcagggctggagagcagagggagaacggtagagcagaatgtcacaaggtgctggggccctgactccctaagtgcaggaaactgctgagtcttgaggtcacttgagcctcctcctgcctctgtgatagctcccacctgccacccccacaggccacacggtccaaatgtctcatcaactgctagcatacgctaagcagaagaaagcgtgtggctgtcccattttttatgcaccaagccgtgaggccagaggcaccacccctctgcttggaggattctgagggtggtggtagttgtcatctttccagggaatgtgtggccttctagagcctaataatagtgataaccataactgccgcttatggaggacactcatgagacggtaccgagctcgaattcgaatacatnnnnnnnnnnnnnnnnnnnnnnnnnnnnnnnnnnnnnnnnnnnnnnnnnnnnnnnnnnnnnnnnnnnnnnnnnnnnnnnnnnnnnnnnnnnnnnnnnnnnacccaagggaaaaacagtgtgaagtccagttttcagcctgcccaatgaagcctgagctacagcaaccatggtaggatgaggaaccaatgtctgcccattggcaggagccatagatacaaacccaaccacttgctccaaaaagtgctgcagctgcggctttcacactgcactttgcattctcctttcagctctgttgcggaggtagccgctactaagcttactttaccagttactaatgtgccaaaaatggatccagccacattctccatgagcttcccacccccaggaagtacccctgttcagtagactccagaagcaaaagacacctgccagaatctgttctcttcctccacctcccacctcccctttgcatgatggatacctgcacccttctcgctcctggagtcggacatatccaaaatcggtcatttggggtacgggcctaatagaataagctttaatgtaaacccaagtaaagcatgtcttatgcctcctgtgccaatgaattgaggaggcatctacccaggcgaggctagccaggtgccccacagtaccccacgggccactgtgttcctcttgattagaaaagttcctaacttattgcaacccagggtttacatccccacctgactcaggccccttaaggcaggaaccttatcctgtttaccaacaactctgggtaatacatagcttttgctagtaacaggggctactaacagctgggcacagtggctcatgcctgtaatcggagcactttgggaggccgaggcaggtggatcacctgaggtcaggagttcgagaccagcctggccaacatggtgaaaccccatctctactaaaaatacaaaaataagcggggtatggtggcgcatgcctgtaattccagctactcaggaggctgaggcagggaggattgctttaacccgggaggcggaggttgcagtgagctgagatcacatcactgcactccagcctgggtgacagagcggagtctcaaataacaaaaacaaaaagacaccttagtgtgaatttaagatgaagcactatctcccccaaggatattggcttgagggatgcaggagggtgcatgaagagagaagtacagggggctgcaatcgggacacgggggacaccaggctgaaaacagtacgccttccctcctcggtaaaggtcagtcaaccctggtgctatttccatcccccaccccattccctttttttttcttttttccttttccattttcaggattttcatgtcataactggtttcttgataacagcaatgtcacatgcctgaaaaaagtaagcacttggtcattcagagaaaattacccaatttttggtttccccttgaactttgttttcctgctctgatgccaacctctcagccatgccaccgccctttagtgccgagatcagaagatgaaaagaaaggaaaagcataaaatcagttggatatttttaaaaggccaatggcatctcttagataaatgggtttcacggggaaagagagttaggaggccattaaatttctttaactctccctcacccatcagcacaagcaaattaaacaaagaaaaaaaggaagccaccagggcaataaattcttaacacaaaccaaaggccttttctagttgctgtatcccctttccctaaatgaaaaagtatctcactaaccctttcttcatatttttcttcacttactttcttctaatcactttaggatattagagctgctactccaaagtgagaaattgcaataaatgtgcttaggcccacatttacataaacttttctttttgggggggtagagtgtattattatattcacagtgtaactattgctgttcaggggtgacttttcagacaccatgaattcaacagcatcctcgaataagcatttttcttttcccaattgagacaagatttggaagttaacaaaccatttaataatatggcttcattttgttggcatggtctcactcactcacacacacacacacacaaaaaacagtaggaaaacactttccatatagtcttgctccccaaagggtgatgattcgggtcaggggacaccctgtaagacaatgcgctgcatgtaacctccatttcaagccaaagccaagacaatgaagacggctcccacagggtgcacacctccagcaagtgaatacagtagtagcagcagagcatggtcgtggaagttggggaaaagcgagaaaaccaagtgggcaaaattatgtcatttttgtatttttcaaaatgaatgttctttggacttacattagcagctagaaatgaatgtaaatgttctttcacttcagcaaggcattcttggaaggatgtcatcccactgttaataaaaatacaggcggggcacagtggctcatgcctgtaatcccagcactttgagaggccgaggtgggcagatcacctgaggtcaggagtttgagaacagcctggacaacatggcgaaaccctgtctctactaaaaatacaaaaaagtagccgagcatggtagcgggtgcctgtaatcccagctacttgggaggctgaggcaggagaatcatttgaaccagggaggccgaggctgccgtaagctgagattgcaccattgcactccagcctgggcaacaagagcaaaactctgtctcaaaaaaaaaaaaaaaaaaaaaaaaaaaaaaccacatagagggccaccccctaagaaaaacttaaaaccactgatttgtggtcaggtagcaacatcagggtggaaattttaatgcaaacatcatatttggggtacaaaagtaaattaaccaagatccccggagactatcacattactaaaaagggcagtgaaaacacattttcttgataaaatatatgacctaatttagccaatataagcatggttacattttccttagtcctacttctctatcatttttaagaccatgtgacaggtgtctcaggtgtcatctcagatgtgccatgttatacactgtgttctgtctgcagggcttcatcatacttccagaataagtttaatctacaaaaatggacttatgttaacacaaatatcaaccacaaaaccttaaggatgttgttagctttggctttttgaaggaaaattctccacatttatgcaactccattatctacgtgggggagtctccggagggtctccaaaagctgaccaaaccctaaagtattttttctccttttaatctgaaatcattcccgaatatgacaagtcaaattatcacttggttttccctgaataggacaaccctgtattataaccttgaccctgacaaggactgctcggttctaatgcctacactcccacctccttggcagaaagtgccctggcagtattgactgtaaacagagaggtagaaacaaagggatcttcagtaaaggcaccatctactgtctaaagttggaaagcaccaatcaacaggttcttcaggtggagaggtggattagggaagagctatgaggacctgagatgagttctagatcaggactgatcttgagccgtccgaagagtggctggtgggagcaactctcaaagcagaggttttcaaacttgcctgcacattagaatcacctgcggcgtcttaaaaattccattgtccaggctgcaacccaggcaagccgaatccagatctctgggagtgggacacaggcaccagtattttttaaaactctccagatgtggggccaagtttgagaaccaatgcccgcaaaagcattcccagcgagctttgagcaacgttttgagcggcataagcagagtcgggagggcagcggccttagggtgaagaacacacaaagcaaatatacaaagtttcaaaaatcctgtgtaactaactccaacatgacagccaagtacctgtctagaggccaaacagtgatgcaacttggaaaagtcccggggagagctagaatgtgtgctccgagtgaggcgggggctctctcggggatgacctccctgggcggcgcagtggtctggaggatcggggagagaaaggtcacacgcccctttctttccaggggatggtccggccgagcacgccgaggacttgtgtacgacaggataggtcagaaactgcttcgtgtgagtctctcccagctgtcactagagccggagggtccaggcaggggtgcgaaggcagaaagtccctcttcactaaagggaggttctgcagggcctcctccctcccaccccgccccgaagcgggttccccagggatcgcccgcatctgttctgcgcctgccctcggcggggcgcggcgcgggagtccgggtcgcatcttcgagccccaggacacgcgcggcgcgggtcaccgagagtggacgcgcggactgagcacagtgcacctggctgagcccgaacccctgggggtcccgccgccctgggcggcccctagcaccccgaaacccggctgccggcgcacaccccgccccgctccagcccggagctcactcaccgccgccgccgcctcctcccgcgtccagctcccgccgcagccagcagagcccggccggagtgcaagggccgcggcgccgccgggaggccgagcgagcccgcgccccgccccgcagtcgccgcccgccctcctgggaggaggggcaggggctggccgggggcctggacccgccggggctgccggcgggcccaaccctcccttcaatccgcccgcggcccgtcgggacgaacctacccaggaacccccgcaccacccgccctcggctccgctgggcccggggctgcgcttagacctcaccccttcccggagccgttcgtccttccacctcccctccgccgtcaccgggcatttttcttctcccagcctcggcctctccaaattcctggcctgcaggaagccctccctatttcgcgctctcgactgcgccgagctcagtttacccctttcccttcctttccctgcttagcctttttccccctcactgtcagaaacttaagggatagcgctcttctgccaccgcaaacccacacctatttattgagcacctactgtgtctagacactggtggggaggttatcccacttgcgcggtaacaagaaatgtctgtctctgttggagaaacagtaaagtgaggcgcctcgtaaggtcacacagctggcggtagtagggctgggattcgaatacagtttttaggtccttgtttagacccaccccacgataaactgcggcacgcctctcgctagctgtgagaacttgggcaaaatgttatcagttctaaaccccagttcactcatccgtaaaatgaaaagctggatacttcaccagctatgaggattccctgagaaaacaacaacctgtactttttttttttttttttttttttttggagatggagtcttgctgttttgcccaggctggagtgcagtagcgcgatctcggctcattgcctctgcctcccgggttcaagcgattctcgtgcctcagcctcccgagtagctgggactacaggtggccaccactacgcgcggctaatttttgtgtttttagtagagacggggtttcaccacgttggtcaggctggtctcgaactcctgaccttaagtaatctacccgcctcggcctcccaaagtgctgggattacagatgtgagccactgcgccctgcccaacctgtacttaatacatgtttgctgacatattgaatgaaatagacccttgaaaacttaacaattcaaaacaatataaaaggacttgaaaaagtaataggttggtgcaaaagtaattgcagttttgctattactttcaatgggaaaagccacagttacttttgctccgacctaataatagtgattcattgccaggaaagaaagaaaaaaaaaaaaagatgctacttatcccaagtgggcagcatggtcaagggagtctttttggaggaagcggtattgcactattccagagctagcaggtctaggttggggaagacagccaaggtgatggggtgtgtgaacagtgcccagagggtggaccagctttcctgagcagaggctgcctggggcaggacacacatgctagaaaatgggatgaggcatactagaaaggtggatggggtcagagggtggaaaaggcatcaaatgccaaagtgagggggctcaaggcaaccaaacagtacttggacacctcaaaatgactagaatggaacctgcatgcaatagagggcacctaaatggccctgggaaccagacgggggagacccatggcctaggaaccagcagagtcatggggtagatggggagttgcagcagggagggacaggaaagaaagaattttccaactgggtgcagtggcttatgcctgtaatcccaacactttgggaggccaaggcagtggatcacctgagcacaggaattcaagaccagcctgggcaacatggcgaaaactgtctctaccaaaaaaaaaaagaaaaagaaaaagaaaaaaagcgcatacacacacacacacacacacacacacacacacacacacacacacacacacacacacacaaattagccaggcatggtagcatgtgcctgtagttccagctactcaggaggctgaggtgggaggatcaactgatcctgggaggttgaggttgcagtgagctgtgactgccccagtggactccagcctgggcaacagaatgaaattgtctcaaaaaaaagaaagaaaagaaaagaaagagagaaaggagagagggagggagggagggagagaaggaaggaagggagggagggaaggaaggaaggaaggaactaatgaaggaaggaaggagagagagaaggggaagggaaggaaaagcagaaggtaaggaaaaggggaagggaagaaaaaggggaagggaaggaaaaagggaagggaagggaaggaaacggggaagggagggaaaaggaagggaaggaaaaagggaagggaagaaaaagagaaaggagggagggagggaaggcaggaaaaggggaagggaaggagaaggggaagggaagcacagggaaggaaaaggggaagggaagggaaaagggaaggtaagggaagggaaaagggaagggaagggctcttgtttggaagaccagatgtcttggtgaccagatgtgtgcaatgagggagtggaactggcaaaggcaaagctgaggcttccaggctgggtgccttggagcatcagaaataggaacaatatggaaagaggctgcttttcaggagagctcctgaaggttccatggagcatgaagtaatggtggaacttttcagtggaaatgccccagcaggcagctgggaagtggaggagtgtctctgggcagcatccatgtggagggtgaggggagagtgaggaccaggagccaggaaaggagagtgcagtgccttcactgagggtggaggaagcagagggcatcacccaagggagaaagaggagggtaactgagagctgttgggaagaacccaggagtctttgacggaagcccaagggtgagggactcctgaaggagagggcagtgccgaatgtcacgaatccacttctcacgtgggcccttccaaggatctgtagagagtgtgcactcaggaaatatttgttaactgtcaaaaaagcatttcatcagcaatttcccctcccatacagatattttgctgatgacaaaaataagaggagtcattggaggtaaagacagaggtgagagagatcagctaccagagatactgctttcgttgctcttattgtcaagatgaatgctcaagccccaccaacctcaacttaaagcaaacagttccagggaatgcttctgaaaaacatttttgtctttttttttatttaatgtaagtctggctcccttaattatggtttttgagccagtagaacgattaaggggaggaagagcggggtcagtgccagcaacttgccaaagagaagtttccaggaggatgagtagagaaaaatcacctcttttctcctccaaattttctgtacataaaatacgtgatacaaaaatattcacataagtgctacagtataaatgacatttgagtagtgacacagaatataggaagggtgacagaagggaggctgcagcatggaataggtcttatggcgtgcacttggaagacgtaatgcaaggccaggcgtggtggatcacacctgtaatcccagcactttggaaggccaagatgggtggatcacttgaggtcaggagtttgagattaccctggccaacatggtaaaaccctatctgtactaaaaatacaaaaaaattagccgggcgtggtggtgcacgcctgtaatcccagctactcgggaggcagagacaggagaatcacttgaacccaggaggcggaggttgcagtgagccaagatcacgtgatcgcactccagcctgagtgacagagtgagacttcatctcaaaaaaaaaaaaaaaaaagaaaagaaaaaagaaaaagaagaagatgtaatgcacatggataacagaaagagtgcggagggcatttctggaaggtgtggtcatacacccgagacagggaaacaggaggaagtgaacaaaacaaaaaataatacacggtttatttgattgaagtggaaaagctattccgcttgtgaagcaagatgggattgggaagggcacctgggaagagggcttttgcttggagtcattgggaaacaggctgccttaatacgggttgccctgaagggggagcctgtgacaagacttgcctgctggtggtgtatttagggtgatccctagaagcaggagagaggaagcaggaagagtgcgacaggcaaggaggaaaggccagtattagggtgtgttaatgagactggtgctatatgcagggggcctgattcccctgggacctcctgggaagatgctgaatgccccccagaattgacaacctgaagctcaggtagctggagtatttttccaagtctccagcaaagaccgctcctacatgccttacccctacttctaggctacccacctcccatgctgagagggctccttggaacaaaagtgctcacttgtgatggaaagctgtcagcacaaagttgatctgagcttccagggagctctcccagcacctatagcttctgcacctcccggctgctgcagtgcacatggtttcaagctctgcccctgctgtgccaggactccttcaggacctggtgcctacatcattccacagccagcagcctctcctggcactatccctctactccaagctgttgtgtggtggagcaactctaccaaaactctgcttccccataaacagctttccccagaaccccagaggtcagattaccagtaggttccatgggcatgacgccatagaaacttctttcccctccagtgagacccagctgtgtcctctccaacaaggtctggctctgagcaggagcagaggggagactaattccttgggtgctcaatctcatttttggactttgcacacttcccacatgaagtgaagaatctcagtcttaaactgttcacttttcaaagtgttcactcctacaagtgttgagggaagagacttaatacatcaaacaatcatattaagtttccgtttgaacttctagagccccttgggcaggcaaacttgctaggcctacggaaaaaagaatcaaaccccttggcaaggggtggcaagccctcaaaatctggccctgactggcagataagtcaatgagagggctatgcccctagccagccatccacactctgggccttctgcagctctattannnnnncnnngnnggggnnngggggggggcgggcgggccnngccccgcgggggcggcggcgggcgcggcggcgggcgcgcgggcccccgccccccgcgcggggcggggcggccgggggcgcccgcccgggcggggccggcccgcgngccggccccgccccgccggccccggccccgcggggggggcccccgggccgcggggccccggggcgggcggccccccgcgcgggggccccgcgcgncggggccccggggggccggcggcggggggccgcgggcgccccgcgggggggcggcggggcgcccgggggggcccgccgggccgggggccngggggggccccgcccgccgtccggcgcctttccccctttccccgcttcccgtttccccccttgttcccccttttccccgccccgccgtttcccgggcnnnnnnnnnnnnnnnnnnnnnnnnnnnnnnnnnnnnnnnnnnnnnnnnnnnnnnnnnnnnnnnnnnnnnnnnnnnnnnnnnnnnnnnnnnnnnnnnnnnntatgatacgaattcgatctcggtaccctcttagatgccagcccctccgtcttgcactttccagcctctagaattataagaaataaatttctgttattcttttttaattactcagtctcaggtattctgtcatagcatcagaatacacactaagatacctgcctaggccatgaggaccccaagacacagcacaaattttgtacaaactctaaccagaccacctttttcctactcccagggtgaggtccttccttcccctgtcccttgcagccctatgggcttttttgctttctctcattctccgggccttctgcagctctatttcctgcaagattgcatcttttctcctggatatttggtcgtcgctgggctgaggtggcagcctagtgttgggagcaggcttctggctggcctctgatcagtaagccagaggggtcaccttgtcctgaaatacaacccagccattggccatgttttccaccatcttatgagtattcccagtgaccaccctcagcagttcaagacaagttgggttacacaacaaggcagcacaataatgaagctcccacccctggcttgggcctgggcgttagaaagccctgcctgcggggggccctctcacatgcagaaggcaatgggtagtagcttcaccagacgatcctctgcctacctgctccaggtctccccctggggccatcccacctcttcctcattaaagcctgtgctgaaaggagcggggttgtttttcaaattctttcagcagtgagttattgatcaacactgatagtgcgagcagcttgatctcaccctgaactggcagagattaattagcttgattcccaagcataattcctaattaggcacaggaagaaaggaaagaaaacacaaaggaactattcttctccaggaaccaccgaccttctgtccaggggtggaggaggaagaaacaggtaagcatgtcccagcaccagagtgcttcctgcccattccaaagctgggcagccagcccgtcagcacaaacaacaccgaggacggtgccagtgccatcctgcaagggtctcagaagaaaatgtgcatttaatttgtttgctttactctctgcctaatgatgggcagggaaggcacaattaagcaggaggctttgaagtacctgctctaggcttgcttagccaccagaggctgaggatgcaagcaggggagagttcagctccaataggctggggaagaaaggttggatggggagggtgtagtggccctgagacttgagcagaaatagtgaaaggaaccacttcctgcagctgagaggcaggagccatcatgttctgttgtgggcattttctagaatgttccagccaggaccagcagctcaaatggctcttccctggtggtgggtagggcaataggagataggagggaccttcaatgtggcaactgtgaggtttggccaatcaacttacccatgctgagcttcggtttctcttcagtgaaatggggataattaatgatcgtatcagcttacatgacggttgtgagaattaactgaagaattcagagatgcatggcacataggaggcacttcctaacccacctaaagaaagcaaacccacagggcagcaaatcagaaatggatgagggctgacctcctctttattcagtagcacatgtctaatagacccgactgtgtctcgcacatgctgcccctgaggaagacttattatagggagctacaaacagtgtcacctgggaaagacagtgaactcagttatagaacaagaacacctgcccgggctgactgggggccaggatgcagggaaggctgcctggaggaagtgacatacccctgagtctcaattggccagggaaacaactgagcaatgatttgtgaaaatgagttcagtagaggttaataaaaattgggagtcctggccagtggctcacgcctgtaatcccagcacttcgggagcccaaggcaggcggatcacaaggtcaggagttcgagaccagcctgatcaacatgatgaaaccctgtctctactaaaaatacaaaaattagccaggcatggtggtgcctgcctgtaatcccagctactcaggaggctgaggcaggagaatcgcttgaacccaggaggcggaggttgcagtgagctgagatcatgccgctgcactccagcctgggcaacagagcaagactccgtctaaaaaaaaaaaaaaaaagggaatccctgctgtctgcagtaggccaatcaagtgtccaagaattgtgagaatgtgcttccccatcaccaccaccagcccacacccacaccaaaatgtgtcacccttcaatcccttcaagtctgtctgctcagcatcctgatccaaacaagccactttaaaaagtgcagttatgaaacaattcgaacactgactggactactgtttatatttttagatgtgatactgtggttatgtttctctaaaagtccttgtctgttagagatacacactgaagtgtttacagagagaatgatacaatcgctgtctggaatccgcttcaataccatccattgttggagggtgggtagtggggttagggggttttgaggaaacaagattggcccggtctatcagcattgatgctgggtgagataggtaaatgggggttcattatacactttacttttgaaaatgaagtttttcgtaataaaaagttgaaagaaagaaggaagggagatgggaaggcagggaaaggagaaagggaaggagagaaggaaaagattctgctcaaatgtccctttggaaaccttccttgacccccgcgttggtgtggggccgggggaatggggaggctgttttctgctcagccagagcaacaaggcccatgaggagacaggagggatgtctggggagcagtcccaagccacagagtccttctggggaccagccacaccatgagagagagcagaacagggagcatagcacagacctatgacatagcactgtgccatgacatcagctggcaaaggcccatgggaccaggagggaggcattagaagggcgaacactagcagctgttgagtaggaagaaatgtgagccgacttctctacctaaggaagcggtggcaaggccgtggaggttcgggatggggacgggttccaggattagagtgcttttttttttctttctttcttttgaaggaggagaggctatgggagcctcaggtaccgagcatctggtgtctggagagatgcagctactcaaggcagtttctgatctggaaccaggaagtctctgtttccccaccagccagcaaacgttctggacttggtgctgggcctgccaccaccaaaggtggagatgccccacatacctgcgtcaggcatgacaggtcacccctgagtccttgggtctccccaaggcttctccagggcttcccaacagggctgagattcaagaaaacgctcaaggtccaccccactgctccgaccctctcaccagaagaaaagggctgtgtcccaagggcagcctgcttgggaaaagaatatgtggggtgacttgtccagatctgcccagggaggctgggaatggagagagaaaggaatctgcccaccagttgggggaaaagtggatttcgcaacaaccttcatgatattaaatgcttggggggcctgggaagaccaaatgtttaatatttggagaagaggctgtctaaacagagtaattaggaggctcctttgtagtgatatgaaagagatgaattgggtatatttgacatcaaagacaggagatccagtggggaatgagacccacggccgggcgtgggcagcgctggaggacaggctctcccagtgtgctgcgggggagggcagcccctgcagtgtgcgtgttgagtgctgggaaacccccaagtaacacttcccccctcatttaacacacttcctaaaacctctcctccccaaaagccactttgcaaaagcagcgattaccaccaaccacgagaaacacaggagcctgccttccactgtttaccactgggcaggaagtcgtttatggaccagtctcttgcccaggctaaactcagaagtggacactgagggccggttgtgggtgccaccaggcaagctagggcatcggagttcagcagagctgggtgggaattctgcttctccctccactacctgggtaaccctgggcaagtcacttagcctctccgagcataaactggtttgcttgtaatatgcaaataataaggggtgggggaaattttttttttttttttttgagacagagtctcgctctgtcacccaggctggagtgcagtggcgtgatctcggctcattgcaacctccgcctcctgggttcaagcaattctcctgcctcagcctcctgagtagctgggattacaggcgcccgccaccactcccagctaatttttgtatttttagtagggacgaggtttcaccatgttggtcaggctggtctcaaactcctgacctcgtgatctgccctccttggccttccaaagtgctgggattacaggcgtgatggagatgatactccctaaatcacaagggtgtggtgtgaagatgaaatggctgcacgtgacagaggagttggagaacaggaagcaagtggattacttggatgaactgtgatgggcccaagaagaactaagccaatcactccagggggcgttttcccaggatccaggcagagagctgattccagcatccacgttgtatccccctcccgctgtggccggggtctccaagagccgggcacccactgcagagcttccaagcccaggcccatttgaacacaggaggacttttgaggttcatttaaccccaaaatcagtgattctacatctcaagctcatattttgaagtgtttacgggtaagtcatatgatactggtcatttattttttaaatattctagccaaaagtacatggtagacaaagtgagaatgtcagaatgttgataattagtgaaactagacgaagatacatgaaagtttaattttgattctcacctactttcatgtgcattaggaaactttcataataagttaaagtaacaaaataggccagactcggctgctcatgcctgcaatcccagcactttgggcggctaaggcaggcggattacttgaggtcacgagtttgaaaccagcctggccaacgtggtgaaaccccatctcccctagaaaataaaacaaaaaaaaaaaattgtagctgggcatggtggcaggcccctgtaatcccacctactcaggagggtgagggaggagaatcgcttgagcctcagaggcagaggttgcagtgagccaagattgcgccattgcactccagcctgggtgagagagcgagactccatctctgaataaataaagtaacaaaatacatttcagtctcgagctccagttccctgccaggaagagctgaagctgagctctggcaccccctgcttcttctccctcatccctaaaacatgtggggtactgggtgccaaaggagatctgaagatggccaccactcagaccagcagtagaggccaagaaggtggtgagaaattttaaggtattgtagcatatgctctccagggtgaggacacaggatgctgggacctaaggagggagaagttaacccagagagggcccaagtcagggaggacctgactgtggtgacagagccagtcatgctaataataggagcagtggttttgcaatcacaaatattggtctgggggactgcgggcccaatgtggtgggagttttagagcagggacccctccactgtacgtggattcttatacttgctaagttgcactgaattctcaatcaacccatttggaggctctcaccaagacaggagtccctttgaattggtaggatgttaaaagcttcctccagccattgaccctgggtcccattggtagaaatcagataataaatcagattttccaggtaatcctcagtttaatgtccattccctcattcaatcaattattcaattacaaatcatttttaatatgattttatggttcaggaattcaggcagggctcagatgggcagttcttctgccccacatggcattggctgataacaggctaccccaaggaaatcacagtgtaatgggagatgggaaataggttaacacaaagttactatactacaagaaaaatcttcaaatcttcaatcttcattcttcatgggtgtgagtcttctctggtggagaagagagttctttgctaaattatattcctgtgttagccagccaagcacacacggagtacagctgtcccttgctattcatggcagattgatcccagacactgccacccccagccctgtgaacaccaaaacccatggatgctcaagtccttgatataaaatggtatggtatttgcacataacctacacacatcttcccatatactttaaatcatcactagattacttataatacctaatgcaatgtaaatgctatgtaagtagttgctacgctgtattgcttagggaataatgacaagaaaaaaaggctgtacaacttcagtacaaatgctatcattcatttttttatctgaatattatgatccatgaatacagagggctggctgtaaaaagaatgtacagtttggtactttactcctagtttaagtcatctctttcggcccatacaggttgcctggggcagggcggtggtgagtgtgttgagtcggccctataccctgttccacaatgcctggtgtccttggcacgtagcttgcagggctgcttccatggatggctgcctcatcccccacccctccttcatggcaccctcttttctccaactccttttcctctgctgagtcctaccttttcttgccagaccagggatttgccaattattctggatgggcacagggaaggggccctcagatcctgcagagggagcatctgaaagacaatgagaccctgtacacaaccaagctgagcctcctgtaagcacatcctctgggtgtcactatgcgaaaagactctttgtctgtttacattgcacaacgaattgtccctctgattgtcctagcgttggtgcatgcatggatccaggaagagcaggtatttggacccaacgagacaggttcatcttggcagtttgtctcctgtggttgctttgtgcctgccccgtatctatccacccaacttctggcagcaatccctccaggacccacctctgtcttcatggtttgtgtgttctgatcctgctccttggccccagaatacaccctccacatctaagctatgcagtgcctcatccccacagctgcagcgattggtttaggaatgggaaaataatccaatcaaagtaagattgtctaatatctgatcccgcttaccccggagccagaagtcccacctttccaggctcctccatgttcctttctggagcaatgaggaggaaggttcattcccttctcagggaacttgctgcggtgtcccagtcctgactgtcccctctctacccctgcctgtggctctcccgtctcctggcattctaacctgccactgaattcttcccacgccaaacgcaggttaggaacctaagctcggatgaaatgctggcttagacctcattgctactgagaagcagaaaccacactttttagttggtagaggtggatgtggattggggccataaagtttcctcaatcattgaataaggatttcattatttggactaactaaatacattagattatttatactaactaaataaattagatttatttttcgaagtttaaaatcattttcaatagtgacgaaaaaggctgtagatgagatgggagaatctttcgacgccaaattcttcccatctcctgcctagtatgtatcactacaccttgcccagagagactgtaggggtgctcagcaaaaaccatggctggttgattccctggaaaaaggggtgctgtcccagggagctctgtgcccttcctgccaacactggggtctagaggaggcaagttcccctctgaaggtgagtatgattcactcattaaaactaagaaatttacattggtatgttactgttaactaacctacagactttttttagatttcaccgttctttacactctcgtcctttccaatttccgggatccaatgcaggataccaggttgcatttttggatgtgtccagtctgtgatcatttctcaatctttcctcattttctcatgacttttgacatttatttatttatttattgtgtgagactgagtctcactctgttgcctaggctggagtgcagtggccccatcctggctcactacaatctccacctcccgggttcaaatgattctcctgcctcagcctcccaagcagctgggattacaggcgcacaccaccacgcctggctaatttgtatttttagtagagatggggtttcaccatgttagccaggctggtctcaaactcctgacttcaggtgatctgcctgcctcggcctcccaaagtgctaggattacaggcgcaggccaccacgcccagcctgacttctgacattagagtacagggagggattctgtagaatgtccctcaatttgggtgtgtctggtgttttgccatgagactggggttatgcttctgggtgccacacagaggtgaaatgtccttctcatcacattattcgagaggtacatggtaccaatgggacttatcgctgctgatgttaaccttgatctcttggttcaggtggtgcctgccagctgtctccactgtggagttactatttttccttttccccattttattcatcagaagccagtcactaagcgaggtcaaactccaggacaggggaattaagtgccaccttctggagagggagcattcacatttattacttgggatccttctgtaaggaagagctgtttctcctctaaaaaactctttaatccttttaagcctcaatttcttaattgtgaaatggggctaatacctgtatccaaccaagggagtagttagaaggtaacatgataggtggaaagcacttaacataggcaaaatgttatgatcaggaatgatcgagagacccatccaactatctgaaggagtcacttaactctactgtactgcagcgctgtaaagtctgcatctttcactgggggtaaaggcccccagtccctgagacgggccagtttggagacaggctggttttttctctgttctcctgagagcccttcagatgagaagggaggtctggagacagaatgccaaaagcccattaaaggcacggccttgcatttcagagagggagcaggtctagagaagaaccagaggagctcagctgagatatggtgtatggattggattttggtagaagatgggaagaaccaaacacctgagaaaccactttgaagatcggggtcagagtaaggcctaacacatagttggctcccagtaattattggttgattgaacagctcaaagagcaactcgaccaagaacactggactgggagtccagttacttggatcttgcattcctgatttatttttattttatatgtattttttctatttttttgagacgaagtctcactcactctgtcgcccaggctggactacaatggcacgatctcggctcactgcaaactctgcctcccaggttcaagcgattctcctgcctcagcctctcgagtagctaggattacaggcatgcaccaccacgctggctaatttttgtatttttaggagagacggggttttgccatgttggccatgctggtgtccacctcctgacctcagttgatcttcctgcctcagccttccaaaatgttgggattacaggcgtgagccaccgtgcctggccgtgatttattttttttgtgtatgtttgtttttgtcaacttgctgtgtgaccttaagcaagttacttaacttctctgggcttcactttccatggatgaacattgtaaagaggctggagagagatgaggactaggtacaggctttagaggagagccaccgccccggacttctccctctgtcaccccgctttccatgaccctccttgcctgactttgtgactccttgcctcgctatcaaaacaagtgctgcaatctcagtgctttccaagagccctgcattgttagaaacttcccagcacgcagcaaaggctgctgcaatactcgctctgcctgcctttgccctgcgcttcctacttaccctccttttgtttctcccaaacatctgtccctgactatgctcatctcatgtttgtcctcagctgctgaaagggccacgtttgctttcattacaaataagaccaccgagtgggctcctggcgtgggggcgggagcagccgcgcgcagtcttcagaggcagccccccaggctgtctctggagggtgtgtctctgcttccctttccccgtgtttattttcagacgaagccaagtggcccggggggaccctccggactcccagccttcagagaggagggcagctcgggctttcgccgcagtgcttcctgcccgtcacgtgtgtgctcctagccggggtcgggggagctggtatcttggcccttctgggaggacgcgcacagcccgaggaggcagagccccagacgggaatgggcttttcagaggtggggtgcgggcgaggggacgatgcattatttttaatatttgatttatttttccaactggacttcttcccggggctctttctgggcccagctgcctttgtgatcccgcgccccggtcctcggcctctcacctccagcgccggggcgccccctgctgtcggaagcggctgtgaccgggcagaggtgctatctgggactctgggttctcagcccggggacagcgaaccgaggggcagatgatccatcagaaaagagccggcactgcccagccccgcgcccctgcccctgcctttttccgggagcgcgccgcgccgcacccgctacggccgcttgaccccatctttgagcccggccccaagctctgggaccgtcgtgcccctcatcaaggaagagccaaggaccccaaggagaaggtcaggagcggcggtgtggatgtcccttggctgcaggccccgccgcgcactcccttcagtccttcccttctctagggaccaggtagcatcagtgcctggatctcggccttgtgtgccctgctccctgccccacctactaagaaccaagtctggttcaccggctcccaagagctggaacccattctcagctagctgggggcccaggccaccccttccctccagacctgtgtgccttctgccctggctccagggccccccacaccgtgaccagggcgggatccctatggggctggccagtcggcaccgtgccaggcccacagtgccctgggcgtccatggaagtcgttctgtgtctttaaaatcagaaggaagacattaacctttaggctgaagaaaatgttttagtacacagcaataacttatttgtctttatccaacagccataaaatataactttaaatattctattgatagagaaaggagttcatgaaggcagaaatgcctggggcccacgaacatcccagtgtggccctggacgggacatcatgctgggcaacacagctaaaatgcgggtgaagaccagatttcttgcacatggcggtgacgggatgctccctagagagcttcaagtggattctttgctttttattttctctcttaataaaaatgtatgatgtttacattgtcagagaacaaacagaactgtggcttgtgtttcatgtcttacgaaatgggtcttgtgtacttttggctgttctttcatgttcttagcagttatagatttggcccctctggaatggaggggccatatatcagggggtttggggcaggggacacggccctctgttcaccctgccctccctgataggttgatttatctccctgcaatcccttattcgccttccgggctggtctccttcccagtccgagatctgcccccaaggctttgtttggcaccgccccacccctgccttccccagtagtctttctacagatcaccccttcccatgtgtcctcagcgcacccctgccttccccaatagtctttctacagatcaccccttcccatgtgtcctcagcgcacccctgccttccccagtagtctttctacagatcaccccttcccatgtgtcctcagcgcacccctgccttccccaatagtctttctacagatcaccccttcccatgtgtcctcaacgctggccttctcaggagttctagcacccgtctccactgctttagcctgctaagactgccataacaaaccaccacagcttgggggattcaaccacagaaatgtgtatgctcataattctggagaccagaagtctgagatcaaggtgtccacagtgctgatttcttctgaggcccgtctccttggtttgtcaagagcctcttctccctgtgtcttcacagggtcttccctctacgcctgtcagtgtcctgatctcctctcagtcacattgggttagggatcaccatatgaccttgtttaaccttactcgtgtctttaaagactctatctttttttttttttttttttttttttttttttgagacagggtctcactatgttgcctgggctggagtgcagtggcgccatctcagctcactgcaagcctctgcctctggggctcaagcaattgtcctgcctcagcctcccgagtagctgggattacaggcgtgcgccaccacccctggctaattttttgtatttttaggagagacggcgtttcaccatgttggccacgctggtcttgaactcctgacctcaagtgatccacccgcctcggcctcccaaagttcggagattacaggtgtgagccaccacgcccagccgtctccaaatacaatcacattgtgcattactacagttaggatttcaacatgtgaatttgagggggactcaaatcagtccatacacccaccaccacctccacttccattcacagaaatgattgccagaactacagaccttgagcttgtgtggggtgacaatccgacaagcaacagtgagacagagctgagagggctgcagaccaggatggtgggaccgaggttgctaacaaagcgctgctgagacctgcacagcatggaggtgctgctgggggagaggggtccccgtgagtggatctgcttggtctgcccttgcaaatagttcttgtcaacgggaaggacttagagccccttgatctacactcatggatacttttttgaactcaaggtttacagtagaaaccagcagcaccccatcccctagggctctctaacccactgtgtctctaccctgaccttacctacctttttttttttttttttttgtgagacagagtctcgctccatcgcccaggctggagtgcagtggtgcgttnnnnnnnnnnnnnnnnnnnnnnnnnnnnnnnnnnnnnnnnnnnnnnnnnnnnnnnnnnnnnnnnnnnnnnnnnnnnnnnnnnnnnnnnnnnnnnnnnnnnttttccagaatgtcatctagttggaatcatacattccgtagccttttcagatgggcttatttcacttgacaataagtttcctccacgtcttgtcatggcttggtagctcctctttagtgctgaacaatatttcgttgcctgggtgtaccacagtttatatatccagtcacctacatcttggttgcacaaggacatctcggttgcttccaagtttcagcaatcatgaataaagttgctataaacattcatgggcgggtttttgcatggatataagtttttaacccatttgagtaaataccaaggagtgtgattgctggatgggatggtaggagtatgcttagttttgtgagatacttcccaactgtcttccacagtggctgcattctcatcagcaatgaatgagagctcctgttgcctcacatcctcaccagcactggatgttgttggtgttctggattttggctgttctcataggtgtgcagtggcattggtgttttaatttgcatttccctgtaacatatgatgtggagcatcttttcatgtttattttgcatctgtataacttctttggtgaggcgtctataaaggtctctggtccactgtaaaatcacgttgtctgttttctcattgttgagtttttgtttttgttttgagatggggtcttgctctgtcacccaggctggagtgcagtggcataatcacagctcgctgcagacttgacctcctgagctcaagctatcctcccacctcagcctctcaagtaactgggactacaggcatgcgccaccatgccttgctaattttttattttttgtagagatgaggtctccttctgttgcccgggctggattcttgagttgtaagttctctgtatattttggaactacggtgtatattactatactggtggacacatattagaaatgggtgcaaacccatagactacgcaacaccaagagtgaaccctaatgtaaactgagtgacagtggactctgagtgattataacgtgtcagtgtaggttcaccatttgcaacaaatgtaccgctctggtgggagtgttaataatgagggctgcgaagcatgcatgggctcagggaggatgtggggaatctccgtattttctgctcaattttactgcgaatttaaaactgctctaaaaaataaactgtattaaaacagaaaaaaataatttaggattaatcaacgtgtaagttcctggtcattgaagtcagaacctcacctcatttggaagcaggaaatcccttctgtactcaccgtgtgcatgggacacactgaccaaaagcccctgcccattggccttcctgggcctgaagtggcacttcatgcttgccctccacttgcctgtcgccacatgcatgccagggtggcctcagccctgccttaccctttgcaggcccaagtcagcggggtcatccccagaaaggacttggtgtcatttctggaacaagtcatttctgggggtgcccctgctgtcacttccctctgctccagggaaccctctcctaggccctgccagggtgtgggacttcttgctgaccccagtccttggctcatctccctctttcttctcccagggtcgttgaagagggagcctattccttccaagccttaaagccaccctccttggctttaagttacagccaacattctggcagtcgtaggatccaccagcagaagctatgttctcctgcttggtctatgggtgaatctccgcagggccctctgttccccactcggtccccactgtgaggccccgcctggcccctctaggttctctgcccccaactggtcctgcccacttctgctctctccttcccttctcctcaatcatcacgcccttgttctcaggcctcactgccccagcacttagcacagaggatcaggaacttccacagtgatcctaaatctccctgttctttttaaatttactttattttttagagcagtgttgggttcacagtagtttttgcttccgtcaaaaaatgcttgttgactcggaacctcttccttggaaatttcaactgcaaatctgagagctgctttagagaaccctctgtgggagagtgcctgccacctgttgctccagttttctgtacataatctatgatcctcctggcaatcccatgatgtgggcattgttattcctgcgttataatcgaggatgttcaggacagagcctatctaggtgggaagtggcatggccaggatatgccccttgggtgccctaggaccagctctgttcccatctctgagctccctctgcccatcgggtaaggtctggtcacttccatactgttttcaatctactctgtgccaggcagggggtcaatcactgagatttgtaaggtacatgggtggggctggaggttagaagagagttttcaaatcactttcagcctagtggggaaggcaggcccatcaccaaggcagtccaccaacaaggctagagggagctgtgcttagcctgagggaagagccccatttctgtggcattatgggtgacatttgaacaactaaccactcatttcattacccagggtcaaacttcgccccagggatattcattagtaagatgaagaggcttactgtttgctgtggtcctaatgtctgtgtcccccaaaattcgtatgttgaaatcttaaccctcaagtcgatgatattaggaggtagggttttggggagaagattgggccataaggagtgaagttccatgaatgggattaatgcccttatgaaacaggccccagagagaaccatcgtttcttttgccatgtgaggttacagtgagaagtcgctggctaggcgttgatggctcttgcctgtaatcccagcactttgggaggccaaggtgggaggatcacttgaggtcaggagttcgagaccatcctgggcaacatagggaaaccacgtctctacaaaaaacacaaaaattaggccaggcacaatggctcacgcctgtgatcccagcattttgggaggctgaggcaggcagatcacttgaggtcaggagttcaagaccagcctggccaacacagtgaaatcccaactccactaaaaatacaaaaactagctggatgtggtggtgcgcacttgtagtcccagctacctgggaggctgagacaggagaattgcttgaacctgggaagcggaggttgctgggagccgagatcgtgccactgcactccagcctggacaacagcatgagactccatctttaaaaaaaaattagcctggtgtggtggtgtgtgcctgtaggtccagctactcaagaggctgggaggattgcttgagcctaggagtttgaggttgcagtgaactatgaccgcaccactgcactccagcctgggcaacaaagaaagaccctgtctttaaaataaaataataataataataataataaaagaaaggccatttatgacccagaaatcaggcccttactagataccagatctaccagcaccttgatcttggacttcccagcctccagaactgtgagctgtacatttctattttttaaaagccaaccagtttatggtatttttgttatagcagcctgaatggacacagttaaacctgactccagaaagtaaagcaggcccctgtgaaggaaggaagagggaggaaggaggaaggaagaagggggagggaggaaggaagagggaaggagggagaagggcggtggcctcacacccccacatctcatccgcccctggtgggcagcctccccaagggattgattccttcctcagcaacagttgctcagagttgagcacaggaacttgcctttttccaagtagcagacacaggccgaggcacagagtggggctgaggaaatgtgccgtgaatggatggtgaacaggaagggacactgaagaaggaggcggtactgagagcagccatcttggagcttggaaacggagacgcatgtgaagccgtttgcacagtatttttcccttaaaatatgggtggggaacaaggggctgtcatttgtctttttctttgggatggtgagcagtgagcagggcacgccgcgaggagcaaactgcagcccaagcacacgcggtcagcacgcggagcacaggtggggagaagcggctgacggtggcgtggccccgcgtacctgggtgtggacgccccgccgccccgcaggggaaagctcctggagtctggggtctgctgccccgagctctgggtgtccaggtaggaaacaggtagagagtatccgggtttcctacccctccgccggggtggctgtgcctccccatcctcctgctcccctccttccctccctccgcaggggagggcaaacccaacccccaggtgagggtctgttctgcgggagtgggaaacagctggcacaggctcaggcggcaggtggtggccctgctcctgctgtgagagatggaagccaggaggcggcgggcgggccgtgctcaggagacccatgccccacccagcctgagactctgtcattcccttccactgggctccccatgagaagccccaaagcaaagtgggtgtggctggtcagggtgagtagggcaggccggaacggacccggacccagaacggaggagggtggtgtggaccaggtgggccgcggaaggcacctagcctaacaggagagggacaggcgcacccccagacggtgggaaagcgccctctgcctccagctgggctcggcccagaccctccacttcccagccccttgcttctctgtgccttggaggtttcagggtgggctggtgggtgggaggacatgtgagagttcctgtgtcaggagttgaagcccatcttggccacttgcctgccggggccctgtagaaacccctgaagctataaacaggtgctcgtcaaagttgattccaggggagggtggcaggagcagtggcgggtggtgtgggaagagaaggactgctctctagagagctgatggcaccaggccgtcaccaccgtggtgacagcacacacacatccacacacacatgcacacacgcacgcacacacgtgcacacacgacacacatgcacacacatgcaagcacacatgcacttgcacgcacacacgtacacgcgcacacgcatgcacgcacgcacacgcacatgcatgacacacatgcacacacacatgccccactcctctactgggaccagcacagcccctccgttcctgctcgcccggaaggagggcgcccagccaggtttcctccccatgaattgagcgccagagaccaacagtgacctgtggtggtttttccaattctcttcccattctgtcaaggacagaggagatgctttgtgatacaaggggaaaaaaaggaaggtggaaagggaagaaagggaagggagggaagtcccccccagagcagcctggggaggggtctgggaccaggcctaggcccaggcacttcctgaagagatcaggtgacggcctccccggcctgcagacctcaaggcggcccaggcctcctctgcgctccctacgcgttgctctggtgctgacatccctggctatgctctccatgtagatgttccttttagcctctgcctcaactgaaatctgaagatcaggccaatttcgtggtctctcagacgtcggtaaacaagaggccttggctcctcaggagaccgagagtctctcactgtacttccttctcttggctccaaggacatagaacggttgctatggggattccttcatttgtaaagtaagttttcagaaaaaataatgactcacaagtcctttaagcaggaacaaagtcaatccttggggacgatatgatctaatagggtttaaaagaggaactgtgacgggctgcagttggcgggcttttcttcttttcctctttgatcctcacgcgtggacgaaacccaccagtggctcaggtgccctggcaccaccatttgcttctttgtgacatctgaggacaggtgttaaaaataacttagaaatggctaactaaggcctgacacactggctcacatctgcaatcccagcactttgagaggctgaggtgggagaattacttgaacccaggagtttgagaccagcctgagtaacgtagtgaaaccttgtttccacaaataattaaaacaaaaaaactagccaggtgtggtggtgcatgcctgtagtcccagctactcgggaggttgaggctggaggatcacttgagcccaggcggttgaggctgcagtaagccatgattgtgccactgcactctagcctgggagacagaatgagatcttctcttagaaaaaaaaagaaagaaaaaaagaaaagaaaagaaaagaaaaggtatgtctagctaggctaacctggagagttactgtcagagtttccaaaagggtcttcatggccacttctgggcctcgctggctgggtgaagttattagtccaagagtgccacatggcctttgcacattcatctgtattatgcctggcgaggcagagggctttccctgcattgattctcctggaagcctggggttagcagtatagactggaaagtaaggtacacagagtggagggactgaaccaggtccccttatatgtgagtacatacagttacttaggccgggaagccaggtcttctaagcagctagggccaacagagcaggagccaggaggaatacttttatgaacaaacttattttccaacatcagaaaaaagaaagttggctgttgggagtgacaaggagaaagaatgatgaggagctcaaatcaggtggacacctgattgagatgatccttcttttgtttagaaaagagtaccacactggctgtcagctgtgtgaccttgagaaagtcactctctctctcaactttctcatctgccaggtaaaagggctgagcttgaatgagcttgggtcccttccagcaatgatgcttgtgtactgcacctgtgctaggaataccagtaaggggctctccatgctaaaatcagcgttccaggattccacgtggcccacagcaccaagcccagccttctcagctttgagctgaaggctccgggtaacctgatcccagcccaacggttctgtgttatctccctctcaccatttcctgtggattacttattgttctatcctcccagccgccagggccttgttcgcacctgctaccagcaaagaatacccctcctaccccagtgccctggcctgaagacgtcctgttagtctttcagctgtcaatgaagatggcccccttttcaagaacccttcctggaatcctgagtttgggggtcgtgatctttccaatcccgtatccacggtcactgccttcacctgaatgcgattgcaattcgctagcccttcaattcaacaaatattctggaatgattagcgtgtgctgtgacaatgacaaattccgatacgggaagacatgaattaaatgatcacgttcacccacgcgtgattagaaacagggaagggtaaagaaggaagagaaaacggcttcctgagagcttgcctggggtctggaaggatgaacacggagctgggggcatggaagggagctgttcccaggagagttgagtgggctgggctggcctcttgaggctgggagaggtagacggtgtgtcttgatcagaggagccatctgggaatcctttgagggtttaaaaaggggagtaacagatccaatttttatttcaggacaatcatgctggctgttagtgaagaatggcctggagcactgggtctccgccccagctgcctgggagaaactgtgttgaaggagccataccccctggcctcccctccagactccagacaaccccagtcagctggctgggagggaggcagaagagaaacaggggtgcacctggggctcctgcaggggtccagccaggagatgggggcaacttggacagggacggtgagagaggaatgggctcggggggcatttgggagatgaaaagggcaaggcttggccatgaattcccatgggatgaaagagaaggaattgtcaggattgagtcccaagtttctagctcatgcaaataaacaaacggggcatccgctgagctcaagagcatggggaaggggtgttggagactctcccggggacccctgcagacttctgtaacccctttgagttctcgcaggcagaggccacggtgggtggggagcaggccttggcagggtacccgccccccaccaggcaccctccatcctagtagcccttggggagacatactgtggccagaggaagggtacggagaggtagaggaagccaaccggtgttcccgggcagccaccatgtggtcaaaggaccaggcagcttgtttggaagcgtctctgaggcacaaagtgccaggacccagtgctccctgagccctcccagcaggaaaatgaaaactcagcaatgggctcccagggaggcgggactgggggtgccttccatttatgagaggcccgcagagcaattcctgccgcaggggtttctgatcagtcagaacatctgcccacgttgatgtcttccagccacctgatgcagtggcttgggcctgtgggttggggggagtgggatcttaggcctgttttttgggttaataaattttgtgaccttggatgacatgtcacttatctcacagatcctgggaagggcaggaggaggagtgagacctggcctgccctctccctagaggctcatcagctccctggagacagacacgccctgggtaaagaacagatcccactcagccaggcagagtttcctggaggaggaggagggagagaaagagggcaggaagaagaggggagggtgcagagggggagaaagaaaggaggggaggaggtgaagagaaaagggaggaggagaaaggaaaaggagaaaacctgttttctgtctttaactgtccttcccctcaactgggaccctgtgctcctcctcctcagtcagaactcccccctcaggtccccccacttcacgtccctccacacttcctgtccctcccccactcatgtccctctccccttatgtccctccccctattgtgtccctcctccccttgtgtccctcctccccttgtgtccctccccctctcaggtccctccccctcctcatgtccctccccatctcaggtccctcccctcctcatgtccctccccatcacaggtccctcccctcctcatgtccctccccatctcaggtccctccccgcctcgtgtcttcctccccctcaggtccctcccaacctcctatccctcctcagcttgtgttcccccaccgctgtgtccctcaccccctcatgtccctcccccctcaggtccctccccctctcaggtccctcctatcctcgtgtccctccctccctcaggtccctcccccactcaggttcctccctccctcctgtccctcccccgctcaggtccctcctcccctcacattcttctgtcttcatttacaggcaggagaaatttcaaagtgtgtttgtaccacaattactttaaaactctaaagttgacctttaacggtttgtggatgttttaattttacttttacgtgataacctgcaataactacacagatgcatgcatttttgtgcttatttgtaagtgctttctttaaaactgcttttttcttacatcctttcagttcctttccctatgcctggagcctgggtaccagctattgaaaactgcttttctccttgttcattcaaacatattcacacataaaggttgtcattcctttttgtcactatttgacaaaaattggatcataccgtatacaattctctgctatttgttttgctcacctaacaataaatacactgtgaaaaataccttcagatgagtagatatcaatcttgttcattcttttttttttttttttttgagacagggtctcactcccttgcccaggttggagtgcagtggttcagtcacagctcactgcagcctcgcctcccaggctcaatcgatcctttcacctcagcctctcgagtagatggaactacaggcatgcaccactgaacctggcgaattttcatatttttttgtagagatggggttttgacatgttgcctaggctggtcttaaattcctaagctcaagagatccgcctacttcagcctccgaaagtgctgggattacaggcctgggccaccttgccctgcctcttactcatttttttattccaggttgcagggttttatttcagcaacacagagacagtcaagcacagccatacagcaggggcatccacagctgcctcaggaggcggcagcgtggcctcttttgcagcttttctctcttccagcatcctctgcttgtgtttggcccggcacttcctggcagaatggtgggcccccaggtcctgatagcggtcctggtaagccttggccacctgggtgaatgctccacttccttggcccagttctacctgtagttgtcttcttcccactactgacaggtcttgagccgctcctggataatattgacgatttcttgatcgactttgtagtccctcctccactgcatttcggcttcatatatgcacagtgtttcacgtgtccatgtgaagacacgtgagaccaccaagcaggctttgtgtgagcaacaagcctgtttatttcacctgggcgcagggggctgagtcctaaaagaaagccagcaaagggtggtggattatcattagttcttacaggttttgggataggcggtggagtttggagcgatgttttgctggcaggggctggatctcacaaagtacattctcaagggtggggagagaattgcaaagaaccttcttcagggtgggggagattacaaagtacattgatcagttagggtggggcagaaacaaatcacaatggtggagtgtcatcagttaaggctattttcacttcttttgtggatctttagttgcttcaggccatctggatgtgtacgtgccagtcacaggggatatgatggctcagcttgggctcagaggcctgacacacaagatgttcttctccttgcgctcagtgatgcccagcacgcggcagtactgccggtggtagtagtaatacctgttctttgcgtgctgccactctataaactctcacgagggtcgccgatcggtccactaggaggtcgaaggccttcatcaggtagacgacggggttgggcagccaagtctgcgatgacagtgctggcatgtggcgcgggggcgcagggtacacatccttgtctcacctgtcccacatggcagcagtgagcgcggacttcgctcctggatgcgctgccctggcctccacctcggtcccggtccctactgattctttgtaatggttgtgtaatattacatggtgtggacttaataaaggacccctacgcagccaagagagtttttttccccaatgggaaaacagattttttttttttaatgtttgagattttagtgaattatttttacctggcaaggagctgaactacctgtactgttcagaagccaagttcagcagtcttgtatgtgggatgtctgtaaagattaagaaagggggcgggcgtggtggttcatgcctgtaatcccagcactttgggaggccgaggtgggtggatcacgaggtcaggagttcgagaccagcctggccaacaaagggaaacccccgtctctactaaaaatacaaaaactatccgtgcgaggtggtgggtgcctgtaatcccagctacttgggaggctgaggcaggagaattgcttgaacccgggaggtggaggctacagtaagcgaagatcgtgccactgcactccagcctggcgacaaagcaagagtctctctcaaaaaaaaaaaaaaaaaaaaaaaaaaagaataagaaatggactctgccccaaggagtctgtgctcttaccagggggcagagccacacgtggccatgagacagctgcccctggcagctgcacggaggagagcttgaccgagcatgcgggagggagggcttgaggctggcccgctgggaggggacagctctggcaggaatcctggaagggcaggtgtggagtcagacatgatctgatgttctgtgtggccaaggcagaaggccaggcaggaaaaacccggttactaagaagattggttgagcagccatctccctcccactgaccgccccccaggaatctgtataacttcagcttattttcagcctttagtttcccctcgttggaggttgagtgcctggtctcttgattttctaactgaagaagggatgaaagtctgagatttcaatcaaaagcttaagaaaataataatccttggttggcccaattctttcctgaaaatacctcacactaagagaaattgcctttaagccccttttcttttctttcatgctttaaatttctttcttaattaaaaagagttgtttacttgatgtgggctccaaagtgcttatttattttaacgtatcttgtttcttttttccttatcttcatgacttgataactctataactctctcttcttgtgtcttaaaatgccggtcgtgtctgtcactgacatgtgataaggaacttcataatcagcccttttctattctcacagaatagaagttgtgtcaataacaaatggaaatcactgagctccaaaattcagctgccctaacctggctgcttgtccctatcagagattttagaatgttttccccttcagatgaatttcagtttcactcaatcctaccagtgtttgatgacaacactcatggaaaactaatggtaaattaatgtctgccttccaaagtacgtggttcagttcactgtgtaaaaaaataatgataataatactaaaggcagccaaactgctgattggcagaattttttcccatcacttaaggcatttgagttgcagtacgcagtctgagaatccctcagagacacaccacccagggacttggatccttgatctcagaaagattgtgatcgaattaagtctgactcaacaaataaggtcgctgggaagaagtgctggcattaaatttaccgttaacgccagggtcaatttactaaacagtcatcgacgtgtggttccacaagacctctgggtaaattccagaaactgactgggaggaagatagcttgcgcatgaagtcactgaatcctggtcagtgtgactcttgatgatcatctctcagtacaccagaaagcatttccaaagacaggacgccacttggcgtggaaagcctttggaagctatggaaggtgacttcttaagttaagtctagaaacgggatggcaggaggacaagaaactgggactctggtgccgggagcctggagtcctcattccactacagatgttaactgggctcagctattcaggtcactcagtggttcatcttagagttgtttctagactagatatttattgccctgcattacaaagacgggaaagtaagagttctgtccatcagccagttgtcaggcgtaaatgacgtctttccctcgcttcctgcgccgcagtttgcttatctgtcagatggagacgctacttacttacttatctactcatcacctccaggactattcacatgaataagaagagaatatagatatgaatttggcatacagagggaaaagttccacacaaatagaaaacactagcggaaataatttctagattcttcctggtgaagcttttcaactacttccaaaacacatcattgctgagcctgtgcaaattcaaatggcacaacccgaagagtcagtggcatggcctcttctctggccagagccttgggggccatcagcctgcacctgcctgtttgttctgccattgcctcatgttctcttcctcagacaccggggaagccaggatcacagaggcacttgtcagcttccttctgaaacagccctcctcagcttctctgctgtgtctcccgggtcttctcacagaattcttggccgggaagccaccttccttaaaggaaatcaagtctcccgatttcctagagccagagtagcatagggggcagctgtggggcttggagccagacagagccttattaattatccatggatcttgctgagccttggtttctcatctgtaaaatgagggtaataaagctactttcctggtcatctatgagtttgaaataaaagaatatgggggccaggtgcagtggctcttgcctttaatcccagcactttgggaggctgaggcaggtggattacctgaggtcaggagttcaagaccaccctggccaacatagtgaaaccctgtctctactaaaaatacaaaaattagccaagtatggtggagggtgcctgtaatcccagctacacgggagactgagtcaggagaatcacttgaacacaggaggtggaggttgcagtgagctgagatggcgccactgcacttcaacctcattgacagagcaagactccatctcaaaatgaagacaaaaacaaagaagagtatgggtgaaagggcctggtgtgtcacgggagttgaatgtgtgtccttttcctttttcccctgttccttccctgtgcagctgcctaccaggcactgtctcctctctcctggggaggcgctgcattttttccctgcaaaggaggtccagaaagcagacccagcccaatgtctgtgcatctgcctggagaaggcctcctgaggagcacaccaacactctccccttccatgttggccttctctgcactattcaggttcttgcctctttggaattgtgtgtatgtggagggaacatctggaggtgtcacttaatttttcatgttacatctggacctgtcacatagccacaaccgtaactgtacatggagaatcatgtcgtgtgtgctgtggacaagccaagaggtggctttgtgtgctcttctgccacacagaagagctgggtgctgcccagcgcgggtgctgggtgaccccggaggaaagagtcattccgagggcctgaagaagggaggaatcggtggcttgtaaggtgcactcccacttcctgtggttttcacaggcgatgacatgaggactggagatgaaatgaagcaaaaccttctggggtcacttgagctatttcttttgagtccacgtctctgggatggcatggcctgtcagccacacccgtttctctcctgttggcagctccattctgcaggggagcaagtgtccagtcctgggagcactggcagcagggatgctcggaatgcccaacctgtcctggggcctgccttcgcctctgcccctcagctgccttgccatctctcttcctcctctttatttttgtctgtccctatggctgtcagtggggtcttgagtcacctatgtcatcatatcaggaacattgtgtgttccaaagtgtgcttggtggaacacttgttacttgaaacagtgctttgtaaaatggatcctggggctagcagctggagatgccgcatcctctatctccttctcgtggatttgcaattcagattctctctattaaccctgaagaatcccataataaatggtttaattttgcttagtagtttcgcccaaacgtttttgatcacggatcctttcgtatgaactcccaagaaacacttattagcagtgtttggtgaatcacactctgggtaaagcgggcatgaacaacatattattcgtaggaatgctgtgacgtcaaactcaccagtgaaaaatctggcatcagagggttatggaaaaatgcgtgtgctttttttttttaatacaaatatgacattggtgcagatcagacgttcccacccctctcaccacaaaaagaacctttttagtcctttcctcaagggattccatgttttaaaggcttttaactacctaacaaactacaatttattgaataataatttatttctttgagttttatttatcaaagacatccaacggccaattagggcttctgatcagtcgagataaccatagttgccacactgagttgatatgactccagcccaaagcaaataaacttaatgttttatttagtctgggaacgtcattgaggtaaatgtatggtttcctctgggctttttgatatcttgaaaatagcttgcagaccccccttgctgccttcatggagtgcaggataggtgggaagcaggaccatggatggaaatgcagaggacgcacagctgttaggagggcgggagggacggggggagggggtggtgactggggctacaccaggacactggatagtagagactaagtggccacagccactgtgaagactgggggtccatgggttggggtgtccagatcctggtgaacaagcaagaagccactagccaaaggcacattcatggtgcacccttaatgtgggcaaaacctgggcacagcaccttccctctgtacgctggctgcattgcacccacccttcccccagcacccagaagaggcccagggaggaggacagggcaaaggggagtgaggcaggcttctttgacgggatactttccccagacctccctgatgcatttttcaatcacgagctactatgaggtggatgtattgccatggccaccttcagtgtcagtagagcccctgggagattaaggcccctgaggattctgcggtcggcttgctcctcacctcgaaggagagacctctgcccagggagctcatccttgcttagcagaacctgtgccactgttcatatggaaaggatgaggcactagagccacattcaggctcatcaagcagttctgtctcagatgatggagagccatgcgctccctaaatagagggtttcctggtgcattggagatgggattcgacatcctgtaatccactttccacctgactttacagaagagctgttactcgaagtaagagagagggctcctccgcaggagaaaagtgctcaggccatgccctttgcagccccattcagcctccatgggctgggtcctaagcccctcctggacccccagttactctcacagccccagacccctgcttagcaatggccttgaactaaaacgcatgatcctactttttgcctcccctccctcattagtcaggacagcattttcccaaaagatacaatctgtgtctggcggaagcctacttgcaaaaataaattcttccctgaacattttccaggcccattttagaaataaatctgggtgatgccttttactcatttccaaagccaaacaacctgaaccccgaggccttgttctgcagtgtaaatgttacgaggaggagggaatcaggatcggctcctcagaagaacccatctccacctctagcagggaggctgagcagtccccacagctgtacccaccgcaaaccactgctgctcagatctggggacacaggtggatggagctcacagcctgggtcccaggacagcacagccgcacccatccctctcaccctgccaggctctcccgcagcagggagccttcctctggtttctgggtgcactgacggctgcagcagctacaatctccctgatacccattcattcattcactcactcactaaatatttctgctgagcgcctgttatgtgtcaggcaccgtgctaagagctagaaatacagcagtgagcaagtgcccacggggcctggcatatatggggcactctactcacagcacaatgaccaagtgcatgagctggaaggcaggaggaagggagaaaaggaagcgtctgtgcagtcagctccctctgcttttgtgtgcaccgtctcattgaatcttcccaaccgcattccgtgattagaaggtgtccccatccccatattcacagaaaaacagccaagttccaaaggaaaggggagaggtggattgatacagtttgtctgatttcagagctccgaactctctcatccacgcacactacaaaggcactcacaagctcacaaacacacagggacacatattcacccccacacatacctggactgtgcctccctcctccgggggtacccagtgattgagccatgcgttaacattctacttttctttctttttctttttttttagacagagtctcgctctgtcgcccaggctggagtacagtggtgcgatcttggctcactgcaacctctgcctcctgggctccagcgattctcctgtctcagcctcccgagtagttgagattacaggcatgtgccacctcacctggctaatttttgtattttttagaatagagacagggtttcaccatgttgatcaggctggtctcaaactcctgacctcaggtgatccgcccgcctcggcctcccaaagtgttgggattataggcgtaagccactgtgcccggccaacattctactttttttcatcataaccatgttctgagcacccgctccggctcctgtatgctcctgtctgggcccaggaacccagagcaacaggggagactgagtccctgcccttcagtcatgtgctgtctagaaggaagccactggctgtggctactaaacgtgtgaattgtggttaactctacattgacatgtgctgtgagtgtgaaatacacactgagtttctaagacttagtaagaagaaaagaatgcaaaatattccatactttaaccaggttgagtaccccttatctgaaatgcttcagaccagaagtgttttggatttcgcatttgttctgtttttggaatactatttgtgtatacataaatgagatatcttggggatgggacctaagtttaaacatgaaattcatatatgttttttatacaccgtatatacatagcctgaaggtaacttcatataaaattttaaataattttgttcatgaaacagaagttttggctgcatgttgactgtgacctggaacatgaggtcaggggtggaactctccttttgcggtgtcatgtcagcactcaaacgctttcggattctggagaatttcaaagctcagattttttaattcgggatgctcaacctgtcttgatcacatgttgaaattatacattttttggatatattgggttaaagaaaaagtatgtaaaagataattttccatgcttcttttaaaaaaatgtggtggctacttacctgtttgagcttgcaggagcgtattttaaaaacgtggctactaaaatatgtaaggtcacatatgaggctcacgtgtgtgctcacatgatattgcttagggacagtgtggctggagatggaaagacaaaccataagcaagcgtacgcatgcggaacaagggtgcctgcgagtgggggtacaggtcagggaggaagcagtacagggcgggtggatgccagcagtcaggatgggtggcctcacgggtggaggggaagccaggagagggaggagccgggagtgagcccagtatgagtcatttcttatcctgcgagggactggggcctgggtcctgaaggaaggaaggaaggagatccagggagctgtataggcgcctgcctttattctttccccgactgagtgaggggtcctggcgctgcaggggccctctggaggtcaccacctccatccagcctctcagtttcatagggtcagtgtctgccacggtcctgatctcgggttggcaaacggtcctcaggccctgccctcgcgggtgctcactccacaggtgcattaatccagtgcctgtgatagtccaagcctgctctaagcgctgcggaggtggtggtgaccaatcaaagtgcccactccagggcagctcacagcaagggtggggtggctggagacagacaacaggcaaaggaacaactacatgtgtcaggtgtggtcggtgaaaagaaacatcaagagggagcatggatgggtgggagctgtgttagagagaaggtgacatttcaggagggacctgaatgaattcagggatggagccatgatcacaccaaga

SEQ ID NO: 10476 - DNA, 3067 bp, Homo sapiens
ggcacgagcaatgggacttatcgctgctgatgttaaccttgatctcttggttcaggtggtgcctgccagctgtctccactgtggagttactatttttccttttccccattttattcatcagaagccagtcactaagcgaggtcaaactccaggacaggggaattaagtgccaccttctggagagggagcattcacatttattacttgggatccttctgtaaggaagagctgtttctcctctaaaaaactctttaatccttttaagcctcaatttcttaattgtgaaatggggctaatacctgtatccaaccaagggagtagttagaaggtaacatgataggtggaaagcacttaacataggcaaaatgttattatcaggaatgatcgagagacccatccaactatctgaaggagtcacttaactctactgtactgcagcgctgtaaagtctgcatctttcactgggggtaaaggcccccagtccctgagacgggccagtttggagacaggctggttttttctctgttctcctgagagcccttcagatgagaagggaggtctggagacagaatgccaaaagcccattaaaggcacggccttgcatttcagagagggagcaggtctagagaagaaccagaggagctcagctgagatatggtgtatggattggattttggtagaagatgggaagaaccaaacacctgagaaaccactttgaagatcggggtcagagtaaggcctaacacatagttggctcccagtaattattggttgattgaacagctcaaagagcaactcgaccaagaacactggactgggagtccagttacttggatcttgcattcctgatttatttttattttatatgtattttttctatttttttgagacgaagtctcactcactctgtcgcccaggctggactacaatggcacgatctcggctcactgcaaactctgcctcccaggttcaagcgattctcctgcctcagcctctcgagtagctaggattacaggcatgcaccaccacgctggctaatttttgtatttttagtagagacggggttttgccatgttggccatgctggtgtccacctcctgacctcagttgatcttcctgcctcagccttccaaaatgttgggattacaggcgtgagccaccgtgcctggccgtgatttattttttttgtgtatgtttgtttttgtcaacttgctgtgtgaccttaagcaagttacttaacttctctgggcttcactttccatggatgaacattgtaaagaggctggagagagatgaggactaggtacaggctttagaggagagccaccgccccggacttctccctctgtcaccccgctttccatgaccctccttgcctgactttgtgactccttgcctcgctatcaaaacaagtgctgcaatctcagtgctttccaagagccctgcattgttagaaacttcccagcacgcagcaaaggctgctgcaatactcgctctgcctgcctttgccctgcgcttcctacttaccctccttttgtttctcccaaacatctgtccctgactatgctcatctcatgtttgtcctcagctgctgaaagggccacgtttgttttcattacaaataagaccaccgagtgggctcctggcgtgggggcgggagcagccgcgcgcagtcttcagaggcagccccccaggctgtctctggagggtgtgtctctgcttccctttccccgtgtttattttcagacgaagccaagtggcccggggggaccctccggactcccagccttcagagaggagggcagctcgggctttcgccgcagtgcttcctgcccgtcacgtgtgtgctcctagccggggtcgggggagctggtatcttggcccttctgggaggacgcgcacagcccgaggaggcagagccccagacgggaatgggcttttcagaggtggggtgcgggcgaggggacgatgcattatttttaatatttgatttatttttccaactggacttcttcccggggctctttctgggcccagctgcctttgtgatcccgcgccccggtcctcggcctctcacctccagcgccggggcgccccctgctgtcggaagcggctgtgaccgggcagaggtgctatctgggactctgggttctcagcccggggacagcgaaccgaggggcagatgatccatcagaaaagagccggcactgcccagccccgcgcccctgcccctgcctttttccgggagcgcgccgcgccgcacccgctacggccgcttgaccccatctttgagcccggccccaagctctgggaccgtcgtgcccctcatcaaggaagagccaaggaccccaaggagaaggtcaggagcggcggtgtggatgtcccttggctgcaggccccgccgcgcactcccttcagtccttcccttctctagggaccaggtagcatcagtgcctggatctcggccttgtgtgccctgctccctgccccacctactaagaaccaagtctggttcaccggctcccaagagctggaacccattctcagctagctgggggcccaggccaccccttccctccagacctgtgtgccttctgccctggctccagggccccccacaccgtgaccagggcgggatccctatggggctggccagtcggcaccgtgccaggcccacagtgccctgggcgtccatggaagtcgttctgtgtctttaaaatcagaaggaagacattaacctttaggctgaagaaaatgttttagtacacagcaataacttatttgtctttatccaacagccataaaatataactttaaatattctattgatagagaaaggagttcatgaaggcagaaatgcctggggcccacgaacatcccagtgtggccctggacgggacatcatgctgggcaacacagctaaaatgcgggtgaagaccagatttcttgcacatggcggtgacgggatgctccctagagagcttcaagtggattctttgctttttattttctctcttaataaaaatgtatgatgtttacattgtcagagaaaaaaaaaaaaaaaaaa

SEQ ID NO: 10477 - DNA, 3105 bp, Homo sapiens
gcaatgggacttatcgctgctgatgttaaccttgatctcttggttcaggtggtgcctgccagctgtctccactgtggagttactattttyccttttccccatttwattcatcagaagccagtcactaagcgaggtcaaactccaggacaggggaattaagtgccaccttctggagagggagcattcacatttattacttgggatccttctgtaaggaagagctgtttctcctctaaaaaactctttaatccttttaagcctcaatttcttaattgtgaaatggggctaatacctgtatccaaccaagggagtagttagaaggtaacatgataggtggaaagcacttaacataggcaaaatgttatkatcaggaatgatcgagagacccatccaactatctgaaggagtcacttaactctactgtactgcagcgctgtaaagtctgcatctttcactgggggtaaaggcccccagtccctgagacgggccagtttggagacaggctggttttttctctgttctcctgagagcccttcagatgagaagggaggtctggagacagaatgccaaaagcccattaaaggcacggccttgcatttcagagagggagcaggtctagagaagaaccagaggagctcagctgagatatggtgtatggattggattttggtagaagatgggaagaaccaaacacctgagaaaccactttgaagatcggggtcagagtaaggcctaacacatagttggctcccagtaattattggttgattgaacagctcaaagagcaactcgaccaagaacactggactgggagtccagttacttggatcttgcattcctgatttatttttattttatatgtattttttctatttttttgagacgaagtytcactcactctgtcgcccaggctggactacaatggcacgatctcggctcactgcaaactctgcctcccaggttcaagcgattctcctgcctcagcctctcgagtagctaggattacaggcatgcaccaccacgctggctaatttttgtattttwagtagagacggggttttgccatgttggccatgctggtgtccacctcctgacctcagttgatcttcctgcctcagccttccaaaatgttgggattacaggcgtgagccaccgtgcctggccgtgatttattttttttgtgtatgtttgtttttgtcaacttgctgtgtgaccttaagcaagttacttaacttctctgggcttcactttccatggatgaacattgtaaagaggctggagagagatgaggactaggtacaggctttagaggagagccaccgccccggacttctccctctgtcaccccgctttccatgaccctccttgcctgactttgtgactccttgcctcgctatcaaaacaagtgctgcaatctcagtgctttccaagagccctgcattgttagaaacttcccagcacgcagcaaaggctgctgcaatactcgctctgcctgcctttgccctgcgcttcctacttaccctccttttgtttctcccaaacatctgtccctgactatgctcatctcatgtttgtcctcagctgctgaaagggccacgtttgytttcattacaaataagaccaccgagtgggctcctggcgtgggggcgggagcagccgcgcgcagtcttcagaggcagccccccaggctgtctctggagggtgtgtctctgcttccctttccccgtgtttattttcagacgaagccaagtggcccggggggaccctccggactcccagccttcagagaggagggcagctcgggctttcgccgcagtgcttcctgcccgtcacgtgtgtgctcctagccggggtcgggggagctggtatcttggcccttctgggaggacgcgcacagcccgaggaggcagagccccagacgggaatgggcttttcagaggtggggtgcgggcgaggggacgatgcattatttttaatatttgatttatttttccaactggacttcttcccggggctctttctgggcccagctgcctttgtgatcccgcgccccggtcctcggcctctcacctccagcgccggggcgccccctgctgtcggaagcggctgtgaccgggcagaggtgctatctgggactctgggttctcagcccggggacagcgaaccgaggggcagatgatccatcagaaaagagccggcactgcccagccccgcgcccctgcccctgcctttttccgggagcgcgccgcgccgcacccgctacggccgcttgaccccatctttgagcccggccccaagctctgggaccgtcgtgcccctcatcaaggaagagccaaggaccccaaggagaaggtcaggagcggcggtgtggatgtsccttggmtgcaggccccgccgcgcactcccttcagtccttcccttctctagggaccaggtagcatcagtgcctggatctcggccttgtgtgccctgctccctgccccacctactaagaaccaagtctggttcaccggctcccaagagctggaacccattctcagctagctgggggcccaggccaccccttccctccagacctgtgtgccttctgccctggctccagggccccccacaccgtgaccagggcgggatccctatggggctggccagtcggcaccgtgccaggcccacagtgccctgggcgtccatggaagtcgttctgtgtctttaaaatcagaaggaagacattaacctttaggctgaagaaaatgttttagtacacagcaataacttatttgtctttatccaacagccataaaatataactttaaatattctattgatagagaaaggagttcatgaaggcagaaatgcctggggcccacgaacatcccagtgtggccctggacgggacatcatgctgggcaacacagctaaaatgcgggtgaagaccagatttcttgcacatggcggtgacgggatgctccctagagagcttcaagtggattctttgctttttattttctctcttaataaaaatgtatgatgtttacattgtcagagaaaaaaaaaaaaaaaaaactcgtagggggggcccgtacccaatcgcctgtgatgatggtatac

SEQ ID NO: 10478 - DNA, 1561 bp, Homo sapiens
cttaaagaggtaatttagccatcattcttatgccagcagatataaataaacttggacccatctggtcttcagctaaacctgagacattttaaagtgcatggacagccatggacagcaggccctcctctaacaggggatgcaaggcatggagaaagacaatcagtacccaagctcagccacagaagacaggagtcactcatataacttgtgtttagaagtttttggtagccacgcacactttctgaaatcacactatctggtggtttaatcatatttttaaagacagaatccctgagtgctgagcagattctcaaaacacatttagaatccctgaaattagaaagatcaatgacaaaatatctgtcagccaggccacaaacaggtgtaaaattatgaaaggagtggttggatgtgccaagtttggtaaagtggtgactgcatctgagaaagaggctgtgaggctgaactcttggtggcttccttctgtaacttccagagggagtcttcaacacaggccccgtgctcgtaggaatacggtagcacctatgtaggaagtgcgtggagttttctgtcttctttctgtgtgatttttggcctttttatcagcacttctcccctcccagsagcctggggatgccaaacatccagaatgtgatgggacaagatgggggcaggggcctcacctccctgcagaggtccggccaggtctccttgtccctggacaatctcctgagcctctctgcttggtggagcaggcacctgtgtgcagaattcccactgtggccagcacgaggaagtcttttctagtgaaaatgtgtcttgtggtcaggaataattatcctttcccctgtagccaccaaggagggcaaatagagaaaggtaacctaattgaaggattggtcatgtgaaaagggctacatttgggaagctgggaaaggcctccaggcttctagagcagctagcttgggctggattctcayacccaggctgccccttggattgttctacccaagcttttccctggggtctgggctcactccataaggtaaggtgccttttaccttatggtccttctttagcaggtaacaaaggagcatcaggggcaggctgccctggtggcatcacactggctagtgaggccgtgaatatcttgtcccccagcagggccgacagtttctatcacagaaaacagtgtgttcagtggtgaaaatcgttgcatgcatgttttcatctgagcgtgtccttctcccatactccctatcagccagccctgcctgtagctgctgtatggtgattgcacttggacatcagtccaatgactgcaagtcggcctggattttcacttgcagaggctacagctgcattgtcaggtctcccagccctgcagagagctccctccactggttagcagtgtgttgtgttttccattcatttcagaagagctacattgtgtcactggacatttttaaaaactgtgatttttaataaaaatttaaaatttgaaaaaaaaaaaaaaaaacctcgggggtaacttttrggggggccggggcccwtgcgtttt

SEQ ID NO: 10479 - DNA, 10620 bp, Homo sapiens
tgtatgtatgtgtgtggtgtgtgaaggtgtatgtggtatgtgtttggtatgtgtatatgtgtactgtgtggtgcatgcatgttctgtgtatttgtgtgcatgtgtatgtatgtgtgcccgtctctgcatatgtgtatgtatatgtgtgcatgtgggtacaggtgtatgtacatgcatgcacatgtgtgcacatgtgtgaatgcatgtgtacatttgtgcatgtgcttatgtgtgtggatgcatgtgttcatgtaaatgcatgcatttgtgcccatgcacatgtgtatgtacatgtgtgcatatacatgtatgcactgacatatatgcatgtgtgcatatgtacacgtgtgcatgccttctgtgcatgtgtgaatgcatgtgtgcatgtggatgtatatgtgtgcatgtctgcgcatgtgtgtaacctccttagaacaggcagaaattggggctctggaatcctttctttgcctaccgcagttccttttaggctgtcttcatagagaaagggatagctcaaaacccacagccctgctttggcctgatgggggatttctgggtctcctcagtctgtcttttattaggcaggccatgggctgtcaggccctggctgggtagatgctctgctcatgaataaaagatagaggcagggcaggacagggccctccctgatgggcctccccgccgttctgtgtggtggaatctcacagtcaactttgacctgtgcacatccacttttttttttgagataggatcttgctctgtcacccagctgggagtgcagtggtgccatcacagctcatttcagcctcgacctcccaggctcaagcaatcttcctgccccagcctcccaagtagctgggactacaggtgcataccaccacacccggctaatgttttgatttctgcagagctaaagtcttactatgttgtccaggctggtctcaaactctgggctcaagagatcctcctgccttgggctcccaaactgctgggattacaggcatgagccactgcacccggccaacacattcacttttttgggacatggcagggacttaatgttttagaaaacatttagctacccctttgacaatgctgcttgacactatttgacagtgtgacttaccacatcctaataacttccatgaaaatcatcacaaagcaaattttaaatttttattaaaaatcacagtttttaaaaatgtccagtgacacaatgtagctcttctgaaatgaatggaaaacacaacacactgctaaccagtggagggagctctctgcagggctgggagacctgacaatgcagctgtagcctctgcaagtgaaaatccaggccgacttgcagtcattggactgatgtccaagtgcaatcaccatacagcagctacaggcagggctggctgatagggagtatgggagaaggacacgctcagatgaaaacatgcatgcaacgattttcaccactgaacacactgttttctgtgatagaaactgtcggccctgctgggggacaagatattcacggcctcactagccagtgtgatgccaccagggcagcctgcccctgatgctcctttgttacctgctaaagaaggaccataaggtaaaaggcaccttaccttatggagtgagcccagaccccagggaaaagcttgggtagaacaatccaaggggcagcctgggtatgagaatccagcccaagctagctgctctagaagcctggaggcctttcccagcttcccaaatgtagcccttttcacatgaccaatccttcaattaggttacctttctctatttgccctccttggtggctacaggggaaaggataattattcctgaccacaagacacattttcactagaaaagacttcctcgtgctggccacagtgggaattctgcacacaggtgcctgctccaccaagcagagaggctcaggagattgtccagggacaaggagacctggccggacctctgcagggaggtgaggcccctgcccccatcttgtcccatcacattctggatgtttggcatccccaggctcctgggaggggagaagtgctgataaaaaggccaaaaatcacacagaaagaagacagaaaactccacgcacttcctacataggtgctaccgtattcctacgagcacggggcctgtgttgaagactccctctggaagttacagaaggaagccaccaagagttcagcctcacagcctctttctcagatgcagtcaccactttaccaaacttggcacatccaaccactcctttcataattttacacctgtttgtggcctggctgacagatattttgtcattgatctttctaatttcagggattctaaatgtgttttgagaatctgctcagcactcagggattctgtctttaaaaatatgattaaaccaccagatagtgtgatttcagaaagtgtgcgtggctaccaaaaacttctaaacacaagttatatgagtgactcctgtcttctgtggctgagcttgggtactgattgtctttctccatgccttgcatcccctgttagaggagggcctgctgtccatggctgtccatgcactttaaaatgtctcaggtttagctgaagaccagatgggtccaagtttatttatatctgctggcataagaatgatggctaaattacctctttaagttgtttttttgtttgtttgttttgacagagtctcgctgtgatgcccaagctggagtgcagtggcatgatcttggctcactgcgacctccgtttcctgggttcaagcgattctcctgcctcagcctcccgagtagctgggactacagacacatgccaccatgcccggctaatttttgtatttttagtagagatggggttttaccatattggccaggctagtctcaaactccttacctcaagtgatccacccgcctcggcctcctaaagtgctgagatgtctctttaactttcaagaggtacagcaaaactgaaatcaatgggtgatgacttcttaaagatcaaacatgaagatgaggattagttaagaccagaaaatcattctccgatcttgtatcttcaactcaaattcacactccaaaaggcctgtttgtggtgaggctcagggtctttggcttgttctgaattaatactttctttggaaactctttagatggctttgatccctgtgctgccccccattgcagacacagaaagcgacaggggattctggcggcaccctctctgtggaggagaggaaggtgtggaccacgttcagaggaaggcagcctgaagctgtcctcagtgagatgctgggggatgggcctcttgcccctgctgtgcagcctccatgcagggctttatttaccagtcaccaggtcttcaagacagtctgcaggagagaggatttcagggggaaagtaagccaagccaattcattctcatggtccccttttatcacaaacatgtaagtcttccatctcataacagagacagcaaaagcagtatccaggccttttttttttttctttctttctttccttaactggctacatgcttagaaactgcactggtcaaacttgattttctttttaaagcctcaaaacatttttattgtcaggaaagcttttcagtggccagggatcagtctcatggccgtagaagcagccaaattcctctgcctttgccttcccttcaggagtcacatgctaaggcatccttgggcatttggaaaaggccgcttggggtgagagtgctctaggccactctgcaatgtccctgggcccgatgagtaacaaatgcaccccgggacccagagaagtggaaagacatgaaagggatttggaaacagatcgtaaaaataacctgtatgaaaatcacacagacaagaaaacaaacaaatccagctagccccttggatcctgccatccgtcttttctcccgggactgcctttgctttgtggagggtgagtcctgggacaggctttgggtgacaagttgtgggcatgttccatccaagcctggctctcccgactggcagagggaggtggctgacaatcaattcctctggatacattttcctgtgattgctcctgtgatcaaaggcagccaccgacaggtgcgggagcggttagttcaccacgtcatagtagtaattgcgcagccgcagttccactgctgcgaatccgggcctgttttccacactggaatggaagagatgcattcttgtttgtcaatgtgcttgtgaaaaattgctgatcacaagcagggcctctgcaggctgagtaccagtggtgctgctccctggtggctaactctagggcctgcagctcacagcgtggtccctgtgccccccaccccagggtgaccacaaggctgtcaaaaatagtgtcggcctactgtagacctaaataacccatatctgcactttaacaagacctcccggtgattcatgtccaccctaaagtaggagactttttgcattagaactgggagtgttttagccccaggttcagatatgcggcacacaatatgcttctgtgccacaggcaacacgaagaggctgtcactctgtgattttagcaaaacaggtgtctgaaaatacttggcaaatgttctgcagatatagtcaacatctgactcataatcttgttaagagaagaaatacgaacataactttaattctccctttccacgctctaatcgatggctctggattttctgaaaatgggctgttgatatgggttcttaggaaagctcaaaacatgtcatggcaggagcaaagacccagggcttgtctatgatccaccttaatatagccagtccttactgccactgctggccagggaggcactaatgtcagtaaactatgggcaaaagcattaacagttcgcagtctctaaacaaacacttacagacacttctgttttgtcttacacagacatcctgtacagatcagttggaagtaagtactaaaaccctgataatcgatcctcacttagaagttatttttcttattttgcaagatttctggatatattgcaagtgggtgaagttgaaatacaataagtgaaaaagtgaaacagaatgtgaggttaaattgtaggaaaccgtccacattcagccattttgacctatatcaatggcaatttcatatgattcaatgtcgacacaagagaacagccatagaacgcgcatcaggaccaagactcactcatcattataagagcagagtggcttctacaaatcaaaatgggtagctttgtcaaatggcatcaaaatacatggtttctcttatagctttcaatagtgagcaaaatgataaaactgctcgaattgatcagtgtggtcagccatctgtggtcatgtctggggacacgggcctcccagggtgtcactgagaggggctttgtctctggccaccaagtgtgttccgagaggggatatggtggccaagcctctggtacaggagcatgtgtccacccagagggacagcctctgtcttgctcctaaacttctacagtcaaagagaacacacttcagcatctttgcaaaacagggggctctgctccaactgtggggatccaaatggtacaaagagcacctttggatcttgctctgggggttcatctgcccagcagccaaggagcaaacaaatgcagggaaacaggaatacagactcgtcctcaggaaaaacacctggtcaggtctcctaggaaatctctcctgtacatccatgggagatgctgcctccaggaagctgggacacagctgtgcttcagcagcaggagggtgatgcagtgcccttgcgtgcccagcttcctggcctgccctggcctgccactctgctttcgggccagagtgcagattctgctctgctccttgtacccagtgaccctcctcctctcccctcatccctgcactcaaccttgcttcttagcctgcaggtctcagctgcaatccctaaaggcggcctatctggagcccctgctggaagtgtgaggcttccctccccataattttctgttctcttttaaagtttccagtgtgtgattttatataaagagatatatggtctttatcctgggttcctggcacagagctcctaaaacccttggaatttcctgattgttgggctgaaagcagcatcttttgttactcataataaacccccttcaaccatacctgggtttgtgctaatgagactatttctctccctccctccctccttctctcccttcatctacctccctcccgctctctctgtctgtctctatatatcaccttggagagagtggctgtttactactgaggaaaaaatgaaaaaacaaagcaaaacaaaacaaaacagagaatatactaggaccacctgtagtcccttcattgaatccaccacattctagaagctccaatgtgcttctgtgctgcaggcaactgtgagaaactacttcgacacgagagggcttaaaaaaccccatatatacacgtgatatcctccaggcccctgtgccctccttgcttagaattcccactggagtcatccctttcctaagacacatcataggacacacttatttttagcttattgtttattgcctgtctgccccagccccaactataaggtctgatagggacagggtctgaggcttctgtgaggcttgcacctggggtggcagcctgcatagcaggagctccggcagtggccaccgaccctgtgaatgacccagggctctcagaggatgtgccgctcagaggaaagccttggagctgaggttgtgcagggagccaggggacatctcaccaaggtcctgggaattcatgttttatcttgggcttgttgatctttaaacaggaatttgagccgcatctagagcctccctgactctcagagaacctggagagcccaggaaatttctccattcggcagaggcccccactggagggctgggactattaggaaaccgtttttcaggatcaagagcaccaacttctctccatttgcaagggctttccccactggtgtctttaatcaccccaagcatgacttggctctggaaaacactacagtggaaggcttcctgactgattcctgcttttcttagggccagtgtttccttcctggctttcacgctgcctccttgagtgacctgcacagggcaggactctgatgttgtgtttcctctttggaaagtgagagggggaaggagtgaagcatgggccatcccaaaatatgccagattgggatattgattattttgagttgaaaatattggatacattgtagtttcggataggactaactgacctgtctcttcatgcctgcagcaagccataaagattcctctgggaaggagacccttcctgtagcaggatgagaaaatgccccttatcatcagagactgggcattggagctgcaatgggcctgagtaaacatatttaacacagtatcccttatcttccactggttttacaccctcctcatatctcctagcgccttctctagaaaatttactccttctagccagattttatttgtcctgtcatttctccttaaatgtatggttctttgtctaaagattataaaagcatgttgttttggccacttctttagacttcactgtcttgtgaggatccccataaacatgtaaaactagtaaaattggtaagcttttcttttgttaatctggcctggtatcaatttggtttctaggtccagctgaagagtccattaagactaaaaaggggttggaggtaatctctggctgtcttacaagggtgagggatgctgtctgccttctcagggctttgtcattgaggctgggaagtccctttgaattccctccaggaccacaccctggaactgatgacaatgcctgcagtgagggaccccctgcatcttctggagggcctcaagcaatagcctgggttaccaggaccagcccttggcgcttctgagttctccttgtggccctgctccaaggaatcttttccttttttttcattcaactgcacctcattgaatttcttatgtttagacaaagtgattcagagctagaaagaaattatttaggcagatagtgagggtaacagagtcctctgtaaggtttccttgcaataaaaagcagctcctaaatcatgtcttttataacaaaaagcagcctgaaaaatcaagctgcaagcatagctaagcaagctaaaagctcacataggtaaatgccggcagctgtgtcaatagaaaagggatccctggagccagggatattcaacatggaggttccctcttccactttccttgttgccacgtgtgcagtaaaaaagcaggcaacaaggctgaggcgggcggatcatgaggtcaggagatcgagaccatcctgactaacacggtgaaaccccgtctccactaaaaaatacaaaaaaattagctgggcgtggtggcgggcgcctgtagtcccagctactcgggaggctgaggcaggagtatggtgtgaacccgggagacagagcttgcagtgagcccagatcgcgccactgcactccagcctgggcgacagagtgagactccgtctcaaaaaaaaaaaaaaaaaaaaagcaggcaacatggcgtcggccaaggagagacctcatctgcataataaaagattagggtggggcagccagtttcttttcgtgttatgtaaatggcctggctgtccaaccgatctttgggccctatgtaatcagactcaagctcgtctataaaacccttgcatttccacacggagccggaagaaccacttgggagcccttgtctctctgcaggaaagagagcttttctcttttctgttgcctattaaacctctgctcttaaactcacttcttgtgtgtctgcatctttgatttccttggcgtgaggcaacgagctcaggtattaccccagacaaacacagctgcttcaaaagtttcagaacatctccccacctcccccaaccctgtttgaggtcactactagaaacactgtaaccttcagaaatatagctttgttgggaaataaatcaaagtctgataaagagctgtgatttctaatatggggcatgggccattgtcatgatttccttttgactggggcttgtgccctggagctgactcctccaagcctgcagaactcactgaaatgcacccctgcagagcggactggggtgggaaccaaggggaaagacattgcctgcctgtgaacctcactcaggttccatcttaaatctccaggcgggaaaatacgtttagaaagaatactctcttaaggagactgttctactgctctactttgctgtaattctggtgaacatccagtgaatatcacgtagactgctttccctccccggtctgcccctggtggaccactctggaaataactgcccactgttacgtgcgtccatggaggacagaggtcggcccagcagcccctatcctgattccttgagtcacaagaatacaccacgagcccaaagggtattcagcagcctcactgcacccacctgggagccaagtgggaggtggtgcccctggctgcgcaccctgctctcttcccacccacctttcactcctcactgttaaacacacaccacaaagaagaatcgacagaagtacatagatcagcatcaacgttaaatgcaaaaactcccccactgcgagttcatttttaattcaaagtttttgcatttgtatcacaatgttttaaactctaccctcctcacccttctacaagaagggaagccttgcaaagggagctgcaggctggaccaaagaacactttcagtaaagggtcataggctgccacgtgcccaagggctgccctccccagggtccagtgctgccagtgcctacctgccaatggttcttacgattctagtttaggcactgggagaattaagccaagacttaggaataaacatcctcttagatccatgagtagcacttccctcttgctgacacttagctctccctgttgcactaacacttggggttggagaagatgctccggggcccaggccaggctcctctcctgagccacggcagcagcaggggcagggaagcatatacccacagtttgcctgctgcctttgtggctgccccctgggtggtttctagatacagaatgagattatttccctgtcactcacaattgtggtagagtgatactcccagggtggggaggggaggtctcggaatcccaggtggcatctgcagcatttggaatagccctcatctttcagaggctctggcaatgtcagctgtatctgaaggcaaacctgattccgcaaagcatcaaatccatggccaggatttgtgatgtcctcctgatcacaaaccacatcgattctcagctgtgtgggctctgtgtgcacagttcagtaccagggaactggagatggcggcttggggtcaccgtgctatgcacgcacaagcaggctgctgagcctggcaaaactgtactcctaattttcagtggcaatgcattttccttccttgctgagctgccctgaacatcacctaagaataatgccaggtgtactttaaaagcataacagcacctgggatccactaagcgagacgtatgacggcagtcagggtggactgaggccaccacttcaaggatgagg

SEQ ID NO: 10480 - DNA, 980 bp, Artificial Sequence
  Incyte LifeSeq database template #LS_1076101.8, human endogenous retroviral sequence (HERV)
gccgctgccgctccaggagacaggttcccatgcaggaatgaaagacatggaagggaagaggggggccagctccctgagtcctgtgtccaccagctgctgctaaatacctctgagaaactctgcttctatctaaggggacctacttctctcgggaatctcaatacttggaacaagaacctcctagacggaccctttggcataatgaattggaccaactgtaggttccaggactagagagccagcaatgcctccatgaacaatctcacccaattactctgctcaggaaacgaggtaactgatggacagccgaggcagccccttaggcggcttaggcctcccctgtggagcatccctgaggcggactccggccagcccgagtgatgcgatccaaagagcactcccgggtaggaaattgccccggtggaatgcctcaccagagcagcgtgtagcagttccctgtggaggattaacacagtggctgaacaccgggaaggaactggcacttggagtccggacatctgaaacttgtagactgggagctgtacatggatgggagcagcttcaccaacccctgcaaagtgactctgaagaagacgacaagccctgctccagtcacacccggaagctgactggtccacgcacagctgaagcatgaggaaactcatcgcgggactaattttccttaaaatttagacttgcacagtaaggacttcaactgaccttcctcagactgagaactgtttccagtatatacatcaagtcactgaggtaggacaaaagattgctacattcctattattttaaggttacatttttggggacccctctttcttctgttctagctattacctttcttgtgtcacctagaaaaggaccagtccttaattgtattttaaaaactgtgatcatgggaagctttaaattggttcaataacacgcatcaagttggttatttcctgggctacataccttggatagat

SEQ ID NO: 10481 - protein, 118 aa, Artificial Sequence [sequence omitted]

SEQ ID NO: 10482 - DNA, 2007 bp, Artificial Sequence
  His-Ly1452, Ly1452 with His tag
atgcagcatcaccaccatcaccacgtgtcacaatctacagtcaggcaggattctcctgtggagccctgggaagggatcagcgatcactctggcattattgatggttcgcccagactcctgaacactgaccatcctccttgccaattagacatcaggctcatgaggcacaaagctgtctggattaacccccaggatgtgcagcaacagccgcaggacttgcaatctcaggtgccagcagcagggaacagtgggacccattttgtgacagatgctgcctctccctcaggcccttcaccttcgtgcctcggggactccctggcagagacaacgttgtctgaggataccacagactccgttggcagcgcttctccccatggctcgagtgaaaagagtagcagcttctctctgtcctcaacagaggtacacatggtccgcccaggatactctcatcgggtgtctctgcccacaagccctgggattttggccacctccccatatcctgagactgacagtgctttttttgagccttcccatctgacatctgctgctgatgaaggtgctgttcaagtcagtagaagaaccatttcttcgaattccttctcaccagaggtatttgtgctgcctgttgatgtagaaaaggaaaatgcccacttttatgttgcagatatgattatatcagcaatggagaaaatgaagtgtaacattctgagtcaacagcagacagagagctggagtaaagaagtcagtgggttacttgggagtgatcagcctgactctgaaatgacttttgataccaacataaagcaagagtctgggtcttctacttcttcatacagtggctatgaaggttgtgctgtgttacaggtcagcccagtgactgaaacacgtacttaccatgatgtgaaagagatttgcaaatgcgatgttgatgaatttgttattttagagcttggagattttaatgatatcacagaaacctgtagctgttcctgcagctcctctaagagtgtcacttatgagccagacttcaattctgcagaactattagccaaagagctgtaccgcgtgttccagaagtgctggatactgtcagtagttaattctcagctggcaggttccctgagtgcagctggctcgatagtcgtaaatgaagagtgtgtccgaaaagactttgaatccagtatgaatgtagtacaggaaattaaatttaagtctaggatcagagggactgaagactgggctcctcctagatttcaaatcatatttaatattcatccaccactcaagagggaccttgtggtggcagcccagaattttttctgtgccggctgtggaactccagtagagcctaagtttgtgaagcggctccggtactgcgaatacctagggaagtatttctgtgactgctgccactcatatgcagagtcgtgcatccctgcccgaatcctgatgatgtgggacttcaagaagtactacgtcagcaatttctccaaacagctgctcgacagcatatggcaccagcccattttcaatttgctgagcatcggccaaagcctgtatgcgaaagccaaggagctggacagagtgaaggaaattcaggagcagctcttccatatcaagaagctgttgaagacctgtaggtttgctaacagtgcattaaaggagttcgagcaggtgccgggacacttgactgatgagctccacctgttctcccttgaggacctggtcaggatcaagaaagggctgctggcacccttactcaaggacattctgaaagcttcccttgcacatgtggctggctgtgagctgtgtcaaggaaagggctttatttgtgaattttgccagaatacgactgtcatcttcccatttcagacagcaacatgtagaagatgttcagcgtgcagggcttgctttcacaaacagtgcttccagtcctccgagtgcccccggtgtgcgaggatcacagcgaggagaaaacttctggaaagtgtggcctctgcagcaaca

SEQ ID NO: 10483 - protein, 669 aa, Artificial Sequence
  His-Ly1452, Ly1452 with His tag
MQHHHHHHVSQSTVRQDSPVEPWEGISDHSGIIDGSPRLLNTDHPPCQLDIRLMRHKAVWINPQDVQQQPQDLQSQVPAAGNSGTHFVTDAASPSGPSPSCLGDSLAETTLSEDTTDSVGSASPHGSSEKSSSFSLSSTEVHMVRPGYSHRVSLPTSPGILATSPYPETDSAFFEPSHLTSAADEGAVQVSRRTISSNSFSPEVFVLPVDVEKENAHFYVADMIISAMEKMKCNILSQQQTESWSKEVSGLLGSDQPDSEMTFDTNIKQESGSSTSSYSGYEGCAVLQVSPVTETRTYHDVKEICKCDVDEFVILELGDFNDITETCSCSCSSSKSVTYEPDFNSAELLAKELYRVFQKCWILSVVNSQLAGSLSAAGSIVVNEECVRKDFESSMNVVQEIKFKSRIRGTEDWAPPRFQIIFNIHPPLKRDLVVAAQNFFCAGCGTPVEPKFVKRLRYCEYLGKYFCDCCHSYAESCIPARILMMWDFKKYYVSNFSKQLLDSIWHQPIFNLLSIGQSLYAKAKELDRVKEIQEQLFHIKKLLKTCRFANSALKEFEQVPGHLTDELHLFSLEDLVRIKKGLLAPLLKDILKASLAHVAGCELCQGKGFICEFCQNTTVIFPFQTATCRRCSACRACFHKQCFQSSECPRCARITARRKLLESVASAAT

SEQ ID NO: 10484 - DNA, 369 bp, Artificial Sequence
  His-TCL-1, TCL-1 with His tag
atgcagcatcaccaccatcaccacgccgagtgcccgacactcggggaggcagtcaccgaccacccggaccgcctgtgggcctgggagaagttcgtgtatttggacgagaagcagcacgcctggctgcccttaaccatcgagataaaggataggttacagttacgggtgctcttgcgtcgggaagacgtcgtcctggggaggcctatgacccccacccagataggcccaagcctgctgcctatcatgtggcagctctaccctgatggacgataccgatcctcagactccagtttctggcgcttagtgtaccacatcaagattgacggcgtggaggacatgcttctcgagctgctgccagatgactgatga

SEQ ID NO: 10485 - protein, 121 aa, Artificial Sequence [sequence omitted]

SEQ ID NO: 10486 - DNA, 524 bp, Homo sapiens
gtgaaacaccctcggccgggaagtcagttcgttctctcctctcctctcttcttgtttgaacatggtgcggactaaagcagacagtgttccaggcacttacagaaaagtggtggctgctcgagcccccagaaaggtgcttggttcttccacctctgccactaattcgacatcagtttcatcgaggaaagctgaaaataaatatgcaggagggaaccccgtttgcgtgcgcccaactcccaagtggcaaaaaggaattggagaattctttaggttgtcccctaaagattctgaaaaagagaatcagattcctgaagaggcaggaagcagtggcttaggaaaagcaaagagaaaagcatgtcctttgcaacctgatcacacaaatgatgaaaaagaatagaactttctcattcatctttgaataacgtctccttgtttaccctggtattctagaatgtaaatttacataaatgtgtttgttccaattagctttgttgaacaggcatttaattaaaaaatttaggttt

SEQ ID NO: 10487 - DNA, 289 bp, Homo sapiens
ctgcttgtacttcaaagccctccgtctagccatctcagccaggctcaggttccttctcccacccatcaggccaagcaggacttgtcaaacatacacattcaagttcctagcacacagtaggtgctaagtgggaattgattataaacttgaattcttccatcaacaaatatccacctctcctgtccagcttgcctcagatcttcaggttctctcttctctgaggcagctaagcttctacatccttcatgaagtttcctttacttctcgacagaagacagttccctttagg

SEQ ID NO: 10488 - DNA, 302 bp, Homo sapiens; identical to SEQ ID NO: 2884

SEQ ID NO: 10489 - DNA, 562 bp, Homo sapiens
tataaactgtggcgggatagttttcgggtccttgtccagtgaaacaccctcggccgggaagtcagttcgttctctcctctcctctcttcttgtttgaacatggtgcggactaaagcagacagtgttccaggcacttacagaaaagtggtggctgctcgagcccccagaaaggtgcttggttcttccacctctgccactaattcgacatcagtttcatcgaggaaagctgaaaataaatatgcaggagggaaccccgtttgcgtgcgcccaactcccaagtggcaaaaaggaattggagaattctttaggttgtcccctaaagattctgaaaaagagaatcagattcctgaagaggcaggaagcagtggcttaggaaaagcaaagagaaaagcatgtcctttgcaacctgatcacacaaatgatgaaaaagaatagaactttctcattcatctttgaataacgtctccttgtttaccctggtattctagaatgtaaatttacataaatgtgtttgttccaattagctttgttgaacaggcatttaattaaaaaatttaggttt

SEQ ID NO: 10490 - DNA, 289 bp, Homo sapiens; identical to SEQ ID NO: 3644

SEQ ID NO: 10491 - DNA, 315 bp, Homo sapiens
aaaaaaacaaaacaaagcaaagcaaagcaaaacaaaacagctctttataatgtacaatggcttaagcaaatcgctttagttttttttctatttaagatttaggacagactactcgtctaaaattcactatttacagagaaggtcctagggaacaggataacttatttaggtttagctctcataatacaatatccataatggctttagaagaatgtaaataaataacattggtaaacagcgtatactgatattttctgacaaactcatttatctaacatcatgctgagcaatcaagaggattcctctatatatttt

SEQ ID NO: 10492 - DNA, 526 bp, Homo sapiens
aaaaaaaaaatcaaaagcagacatgtttggctgaaataaaaccaagaaacacagctaaaactcccccataaacctaaaagtccatggagaattcaatttctcatttccattcagaaatctggctacaaagtgatttgtttgctatttgggacagtacagagtgctgaaagaaacccagctcttgagtctcttagatcccatcctgtaggaagtggtgggaaagccagcggaccatgggcaagtcaactcctggctacttggcagggagtcagactgtgctctctccattccccaggactccacagaaccatctggtactgctagtgctgggtgaacagtgagagcagagtccacaaaacgcagagaaccagaatgtgaccgcaaggagccaggaccttgtgctttttcatggattacaaatctagggccaaggagagggaaagcagaaagagccctattgggaagaggagctggctgcgcccctaaactgagatggaaagagtaaggctcttgagcccacacctgg

SEQ ID NO: 10493 - DNA, 637 bp, Homo sapiens
  misc_feature (1)...(637): n = g, a, c or t
ctgggcaanaccaagtcacagtttccagcgtgctgctcagccctccgagtgtgtgtgctcatccttttcatagaagtcccatmkgscatggagagggttgggctgcaragctgwgattgccagaggcccttccttgagaactgtggggaaggaggccctgggggtttcttctgtaggcagagctcaggccccagtcacctctgccaccctcagcctggcactgttgtgccagagcctctgctgcctctctcttcctacccatctgcagaccagcagaatattctccccctctcatcaccaaccaggagtttggtgtggtttctggacacggccagagcagtcactgcggggctggttttgctgggcttccctgtcaaagcaatgctaacgtccagctctcgactcaaggccaggttcttctcccacttgtggcctcttgggcttggaggctgagccaggggctcctctcctgctggccgtccaggaacagacatcttcacatcctcagtcttccaaacccggaccatgccgtcttgactcccggtgatgatgatctggcttgtgtcccatgctgggccctccatcaggcagcaacaggttatggctccttctgggccccaggctgtggtgatgctgg

SEQ ID NO: 10494 - DNA, 545 bp, Homo sapiens
  misc_feature (1)...(545): n = g, a, c or t
aaacaatgctacactcatttttggcaaagtgctgtattgttcagtctgtgtacaaaactgaccatctatgaaccaatcagtataaaaaatttctataaaaacaaaatttagacagtggctcaagaaaacaagctgccatttatgcatagattgatgtacagtaacctaaccaaatgtcccttttgaattttcaagttactgaaaaaaaatgtgtcgagaaacacattaagaaggcacatgtacagtctacaatactcttcagtctccctaactcatgccctgcccctataaaggaaatatgttcacaattttacttgagaaaaaaaaacaaagccacttaaaaaaaaaaaacacacacgcaattattaaagttcaaaatctctggaggaaaatacaagcaaaaccactcatacactccaagcctgaaacacacatctaacctccccaggtactggtttggttttcagaggtccacctanaaaacaaatactaaaacttcaggcaaaacagagcaaaactggacatttaacaattacacaattttt

SEQ ID NO: 10495 - DNA, 210 bp, Homo sapiens
ctgaataggcacccaaaagtccgtgactaaatttcgtttgtctttttgatagcaaattatgttaagagacagtgatggctagggctcaacaattttgtattcccatgtttgtgtgagacagagtttgttttcccttgaacttggttagaattgtgctactgtgaacgctgatcctgcatatggaagtcccgcttcggtgacatttcctgg

SEQ ID NO: 10496 - DNA, 595 bp, Homo sapiens; identical to SEQ ID NO: 8073
  misc_feature (1)...(595): n = g, a, c or t

SEQ ID NO: 10497 - DNA, 737 bp, Homo sapiens
ctgtggctgtctgtcagagaagcacatttttctgcagataattagaatggcttcccccatctctcacggactgtcccaagtctagaaaagaattgagttcctcttctattagtcaaataaaagggaagagaatgtttgtcttcctttcctttctgtagtgttaagaaaataaacgaacttaatgattctaaattatcagtgagcttaacactgtactatagaccaaagattaccttttcaaaaagtcctttgaggtgaaatattttgtatacgtaatacatagatgcacatataaacacacacatatagaatctcaatattttaacacttctttgggtagttgtactaactcactaaccctgaggaaaaagttaagaaattgaaagtgttttcttcaaaagttgagatttaacaataaaaggtgttactttgataactaaaaggaactttattatcctcttcctaaaataaaccaatgcctattctgaaaatggcacttgcaattacaatttgccattatcaaagctaccactgaggtagaggcattatctaaaacaaataccacttatcatttattggcagttacctcgagagagacccatacaccatcttctagcagagcacagtcaatcaaattaccttcgggtaaagctatagcatgtctagtcgtttgacagatattaaaggtggtcataaaagaaacataaaccataggctgtgctccaaaggcatattgg

SEQ ID NO: 10498 - DNA, 501 bp, Homo sapiens
ctgtacgttacaagtttggtcattttgaagcttgacattttagtttgccattatgttaaaaacatctaaataggtgttagtttctcaggagtagattgttagtgttgacttttcctgtaaagcagacatcgttcttggcctgccctgcattgtatactagatttcattgttgtctctcatgcttcttgagttgcttcatggtttatgctcgccatggaaagctatcagtaacagtttcatgcttataccaaagaattaaatctgatctttaatatctgatattttcctggtactcgtactgataagggattattggaagtcagtcacagaatttggaaataaattctagtctctccttagctatttgatgcttttcatataggccaagaactcattgcaaaacatttttgcaaggatgaatgcctgtatttggtctaggaacagtacattttagtctgatttagaattactggtagcttattttaaagcaaggaaaagcag

SEQ ID NO: 10499 - DNA, 528 bp, Homo sapiens
ccacaagctctttagatggttacttttagtaaactcttcattcatcctggcattcttgaaaatattcgtcaaacatagaggaagactcatcttcacgttcctttggttctttaaattctaggtcttctccatattgaatggcaaaatcaatatgctgcaatacaatgttcatgctttcttcatctgactgatcgtaaggtaaaaatcgaaccatgctgtagtcatcaatcagtccacatatagctttagtcagtttcttgaattttttgcttcttaagtcacttgtagaatcttctaataaagaatacatgtctggatctaaaaatttctcaatttccttttttgcttttttactcagcagatccatttttgtcatgatgttgacttgcggaatttctagagagatcatggcactcagggctgccaagatgccagaaataaacttgaatgactccaccatgaactgagaatcaacaagaaaaactccacagactcggaactcccactgctcgagctgctggaccagct

SEQ ID NO: 10500 - DNA, 486 bp, Homo sapiens
actaaacagccaatcatggtattcaaaggacaccgtaaagcagtctcttatgcaaagtttgtgagtggtgaggaaattgtctctgcctcaacagacagtcagctaaaactgtggaatgtagggaaaccatactgcctacgttccttcaagggtcatatcaatgaaaaaaactttgtaggcctggcttccaatggagattatatagcttgtggaagtgaaaataactctctctacctgtactataaaggactttctaagactttgctaacttttaagtttgatacagtcaaaagtgttctcgacaaagaccgaaaagaagatgatacaaatgaatttgttagtgctgtgtgctggagggcactaccagatggggagtccaatgtgctgattgctgctaacagtcagggtacaattaaggtgctagaattggtatgaagggttaactcaagtcaaattgtacttgatcctgctgaaatacatctgcag

SEQ ID NO: 10501 - DNA, 512 bp, Homo sapiens
  misc_feature (1)...(512): n = g, a, c or t
cctcccctgcagctctctgtgtytgtgatgatggagctgggttggggaaatcctgctgtgacatttgccctgacgcagttccgcacagcatggtggcttccaagctatgctcttgatgggcacccgtaaggagcttctacatgcattagagatggagcctctcctatctttgcaagcctttgtggttcttccctttaaatctgccatccacggacctcaacaggagaataatttggtcttcagtttgctctgttttagacaaatacttcacatgactgatgtaaactgttgcatagtttcacaaaggctttctcattcattcctgaaattctccatcagtcacaaacacaaattgttcagtatctggggaattcaaagccctttcctcaaaacagacatttctccttatcattcttccttcaggggaagtattgaaagtcattgaaagtcatccccacccactagaggagagaaangcaagcccagaaaaggcaagaggtacacaggcancc

SEQ ID NO: 10502 - DNA, 433 bp, Homo sapiens; identical to SEQ ID NO: 8312

SEQ ID NO: 10503 - DNA, 399 bp, Homo sapiens; identical to SEQ ID NO: 8666

SEQ ID NO: 10504 - DNA, 218 bp, Homo sapiens; identical to SEQ ID NO: 3998

SEQ ID NO: 10505 - DNA, 265 bp, Homo sapiens
  misc_feature (1)...(265): n = g, a, c or t
cctagttgaaagtcaagaaggacagcagcaagcataggctcaggattaaagaaaaaaatctgctcacagtctgttctggaggtcacatcaccaacaaagctcacgccctatgcagttctgagaaggtggaggcaccaggctcaaaagaggaaatttasaatytctcattgggagagtaaggtaccctcatcccagaatgataactgcacagtggcacaacaaactccaccctactgcgggtggaccccatccagtctgttgaang

SEQ ID NO: 10506 - DNA, 420 bp, Homo sapiens
cctccaggcttctagagcagctagcttgggctggattctcacacccaggctgccccttggattgttctacccaagcttttccctggggtctgggctcactccataaggtaaggtgccttttaccttatggtccttctttagcaggtaacaaaggagcatcaggggcaggctgccctggtggcatcacactggctagtgaggccgtgaatatcttgtcccccagcagggccgacagtttctatcacagaaaacagtgtgttcagtggtgaaaatcgttgcatgcatgttttcatctgagcgtgtccttctcccatactccctatcagccagccctgcctgtagctgctgtatggtgattgcacttggacatcagtccaatgactgcaagtcggcctggattttcacttgcagaggctacag

SEQ ID NO: 10507 - DNA, 456 bp, Homo sapiens; identical to SEQ ID NO: 4235

SEQ ID NO: 10508 - DNA, 610 bp, Homo sapiens
aaaagaaaattctaccgaaaggcaatacatctgtgtttcaatgccaggtgcaaaggatatagctctatgactgcttacaaaggaaacacatcccagccaagacacaggacactggtcaggacccccggggcctccctccagcacctgtcatcccaggcccccaacagaggagaacccagttccaacttctaacactgtccaccagtggggcctggttctgaatactacagaaatggaatcccacagtctatccccttgggtctcaggcttcttggactcagcgttatgtccgaggcatcactggtggggccactgatcatacagtagccacagctcgctcttttggctgctgtggagtcccccgtggcatgaattcagcaggtgctgcttttctgtgctggtcagactgggcggtgttccaggttgtgtcactgcgtgggggctgctatgagcattctcccatgtgacttctgtcaacacacagttgtcctgtctccacgggggagtggccgaggacttccacagataccagaatctgtgggtgcgcaagtccctgatataaaatgacttggtattttcatacaacctacgcacatcctcccatatattt

SEQ ID NO: 10509 - DNA, 730 bp, Homo sapiens
gaaatgcattttcccttgtcctgtctttaactagatatacatgcttatatttatagtgggtttcacagactataaaattgaatgtatgaaatttttatttatatcagtgcttttaataatgaagatatttttggagtaatggtgctgtcttgtagcgagttattaatcatagtaagatttttttctcttcatttgctttttttgtttcatattaacaatttttttttttacacggacacaaccctctgacagtctttccaaatattaaaatcatttgaatatgtatgctgtgatctgaacactgctcaagtcatcaagcagtcttcatacagtttgcattataaaatctcattaaattctccaagaaaaaataagttgaagaattttatttcctgaccatgcatcccctggatttctgagtttcagttcagattgtagatgacaatataagctgccttccgaaattgtcaacatctgaatgttaagtccattttccccatggaagaagcccgtagttccatgaagtatggattaccatttgtatttttcactaacagtaaatgtatttttcttattaattgtttgccttaggaatgatgaattacattttttgttccttcttaccgtaaacatctgcattcctcagctcagccttccttgtatgttgtttctttataaatggttgagctgctgatgcaggtattgccaagctaacagtacaaatcatttt

SEQ ID NO: 10510 - DNA, 510 bp, Homo sapiens
aaaaaatgggaaattttaatattaagtatgtccatgattgaaagaatcattccagaaatggcagcaaagaggctcaatgaattcattatcatttttcctttgaccaaacacttcctggagtttttctccgttgctgccaggagtgatccggaaataatatacataatgcctccccagggagggtaccacacagtcacacagatgggtgcatagatccctgctgggatcatcagaagaccccccagggcaatgtggaagagcccattcataatctggacagcccccaaagtcttagattccctcatgaagaagctttgcgtggggcccaccagtgaagacatcctcctgaagagtggttttggaccagattgcatagcaatagggcctttcattggctctgccgggaaagtcccatttactgaatttctgggtgttgtcattttgctctcaaaactcctaaaaataaaacaaataacaaaatgaggagagcaagaacaagaattttggcag

SEQ ID NO: 10511 - DNA, 526 bp, Homo sapiens
cctgtcctcttaggactcaaacccagaccctggactgattttccagtccccaccgtcctgcgggacagccagcgtatgctaatgttgcaaacccatgataatgtatgtggaatatcctgccattggggttttacattaaaaccccagaatggctgcagaggggtgaacaggccccaatatttggggtgctgtgatacccctcttctacccacaaggagccctcttgatgatttctgtgaaatcgaggccccttgattgtttctgtgaaacaccctgcacccctagtcctttccccactgagatctttcgggttctctcccctaactcagctcttcgttcccagaaacccagatgtaatccccctacgtggtgcttggggcatcccgataccatctcagtaaatctcctacaatggcctcctcaccctccccgggacccacacccttcaggtcctcaccctgagacaggagggaccctctgagatcagggacccttaggtctcactgctctctgattcagagctcag

SEQ ID NO: 10512 - DNA, 295 bp, Homo sapiens
atcgttgagaatgaatggaaaagaacgtgctccagacccaaatctaacatagttctcctgtcagcagaagaaaaaaaagaacagactattgaaataaaagaagaagtggttgggctaactgaaacatcttcccaaccaaagaatgaagaagacattgaaattattccaatccaagaagaggaagaagaagaaacagagacgaactttccagaacctccccaagatcaggaatcctcaccaatagaaaatgacagctctccttaagtgatttcttctgttttctgtttcctttttt

SEQ ID NO: 10513 - DNA, 364 bp, Homo sapiens
ccagaacgcagagactttatgatgaggacggtgcccacgatgatgccgactaggcccagcaccaggcccagggcacagagcacagtctccgttgtctcaggcatctggattggctcttgggcctcccagtgcttgaggagcggctggtccaagccccagtgctccaccctgcagtcatagaagtcctctgctgagggcacaaaggtcaggtaatggaacttgtggaagctgtaatctgttctgggcaggaagaggctctcagcgacaccctcagtgaccagctccccgttgcacagccacgtgacgttgagcgctggtgggaagaacttgtcaatgtggcagatgagggtgttgggctggccca

SEQ ID NO: 10514 - DNA, 200 bp, Homo sapiens
  misc_feature (1)...(200): n = g, a, c or t
ttctgtgggacttccactgctcaggcgtcannctcagatagccgctggccgcgtacttgttgttgctttgtytggagggtgtggtggtctccactcccgccttgacggggctgctatctgccttccaggccactgtcacggctcccgggtagaagtcacttatgagacacaccagcgtggccttgttggcttgacgctcc

SEQ ID NO: 10515 - DNA, 293 bp, Homo sapiens
  misc_feature (1)...(293): n = g, a, c or t
ccaccctgaccatcaacagggtcgaagccggcgatgaggccgactattactgtcaagtgtgggatcgtaataatgaccatgtcgtcttcggcggagggaccaaactggccgtcctaggtcagcccaaggctgccccctcggtcactctgttcccgccctcctctgaggagcttcaagccaacaaggccacactggtgtgtctcataagtgacttctacccgggagccgtgacagtggcctggaaggcagatancagccccgtcaangcgggagtggagaccaccacaccctcc

SEQ ID NO: 10516 - DNA, 334 bp, Homo sapiens
ccaaaactgcgaagagatgcagaataatgttgacaataataagttgctgaatcgtcaggctgcagactggtgatggttaaattgaattgtgtcccaaatccactgccagtaaatcttaatgagaccccttcttctaaactggaagtcgcataaattaggacattaggggctttgcctggtttctgttgatgccaggccaaccaccgatctatattctgagaggcccgacaacttattgtaactgtatctccgacagatgcagacagggtggaaggagattgggtcatctggatgtcacatttggcacctgggagccagagcagcaggagcccca

SEQ ID NO: 10517 - DNA, 617 bp, Homo sapiens
  misc_feature (1)...(617): n = g, a, c or t
aaaaaatgggaaattttaatattaagtatgtccatgattgaaagaatcattccagaaatggcagcaaagaggctcaatgaattcattatcatttttcctttgaccaaacacttcctggagtttttctccgttgctgccaggagtgatccggaaataatatacataatgcctccccagagagggtaccacacagtcacacagatgggtgcatagatccctgctgggatcatcagaagaccccccagggcaatgtggaagagcccattcataatctggacagcccccaaagtcttagattccctcataaagaagctttgcgtggggcccaccagtgaagacatcctcctgaagagtggttttggaccagattgcatagcaatagggcctttcattggctctgccgggaaagtcccatttactgaatttctgggtgttgtcattttgctctcaaaactcctaaaaataaaacaaataacaaaatgaggagagcaagaacaagatttttggcagtcttaccttgtgtcatgcatctgaatgcttctctcagcctttcctncatggggtgtcattganggtagacatggnctcttccgagtgaccttggatctgaggcaagg

SEQ ID NO: 10518 - DNA, 485 bp, Homo sapiens
aaaaatggagagtctgaattttattagagctcacacaccatatattaacatatacaactgtgaaccagctaatccctctgagaaaaactccccatctacccaatactgttacagcatacaatctctgttcttgggcattttgtcagtgatgctgatctttgccttcttccaggaacttgtaatagctggcatcgttgagaatgaatggaaaagaacgtgctccagacccaaatctaacatagttctcctgtcagcagaagaaaaaaaagaacagactattgaaataaaagaagaagtggttgggctaactgaaacatcttcccaaccaaagaatgaagaagacattgaaattattccaatccaagaagaggaagaagaagaaacagagacgaactttccagaacctccccaagatcaggaatcctcaccaatagaaaatgacagctctccttaagtgatttcttctgttttctgtttcctttttt

SEQ ID NO: 10519 - DNA, 456 bp, Homo sapiens
  misc_feature (1)...(456): n = g, a, c or t
cctcacactttcccatgaaaagggtgaatgtatataacctgagccctctccattcagagttgttctcccatctctgagcaatgggatgttctgttccgcttttatgatatccatcacatcttatcttgatctttgctcccagtggattgtacagtgatgacttttaagccccacggccctgaaataaaatccttccaagggcatnggaagntcactccacctgaaccatggctnttcatgcttncaagngtctgggccttgcccagatagacagggctgactctgctgccccaacctttcaaggaggaaaccagacacctgagacaggagcctgtatgcagcccagtgcagccttgcagaggacaaggctggaggcatttgtcatcactacagatatgcaactaaaatagacgcggagcaagagaaatgcattcccaccgaggccgcttttttagg

SEQ ID NO: 10520 - DNA, 259 bp, Homo sapiens
cccaaatctaacatagttctcctgtcagcagaagaaaaaaaagaacagactattgaaataaaagaagaagtggttgggctaactgaaacatcttcccaaccaaagaatgaagaagacattgaaattattccaatccaagaagaggaagaagaagaaacagagacgaactttccagaacctccccaagatcaggaatcctcaccaatagaaaatgacagctctccttaagtgatttcttctgttttctgtttcctttttt

SEQ ID NO: 10521 - DNA, 603 bp, Homo sapiens
ccagaaattctcccttgcctccttgattgtggtgtcccagatgtagtattcccacaggggtctggcaggcccctcctgtaaccactccagtcacattttctgctcttgaggcagaggtgacatcaggacgtttacagcctccacatgaattgagtgttcatttacctcagtattaccgtgttcatttttgtcctcgtgctacagttagctccctgccgcctcttgcaggtcttacttcagctcttgcctgtgacccacacagcttctgggctctgcctctgctctaagaagtgctgtgggggtagagagccaggaaggacatgctgttgggaatgtacacctgggcagaggtggccctgttaagatgtgactgtagccacagccagggatgggatccctgggtctctggaatctgaaacctcaacaaataccagtcttgacccctagcagcagagataagaataaaggggttggtttgctattaagtcagatgggggctctctccttgtcatgctgtccctgtgggtaacagacagggattgaccatcttactgttgtacaggtagctggtggtgttggattatcccattgaagctgggacag

SEQ ID NO: 10522 - DNA, 222 bp, Homo sapiens
ccatgtccccagaattgaagccagagaatcgctcagatatccctgagggccggtcgttatcaaaagagatgattaggacaggggcctggcctggcttctggtaataccagtgtacattgtgactcccaatattgtttcccccacaggtaatcttggccgtctttcctggggccactgacactgagggtgtctgagtcaacacataggaggtcacagagtctg

SEQ ID NO: 10523 - DNA, 616 bp, Homo sapiens
aaaaaatgggaaattttaatattaagtatgtccatgattgaaagaatcattccagaaatggcagcaaagaggctcaatgaattcattatcatttttcctttgaccaaacacttcctggagtttttctccgttgctgccaggagtgatccggaaataatatacataatgcctccccagagagggtaccacacagtcacacagatgggtgcatagatccctgctgggatcatcagaagaccccccagggcaatgtggaagagcccattcataatctggacagcccccaaagtcttagattccctcatgaagaagctttgcgtggggcccaccagtgaagacatcctcctgaagagtggttttggaccagattgcatagcaatagggcctttcattggctctgccgggaaagtcccatttactgaatttctgggtgttgtcattttgctctcaaaactcctaaaaataaaacaaataacaaaatgaggagagcaagaacaagatttttggcagtcttaccttgtgtcatgcatctgaatgcttctctcagcatttcctccatgagtgtcattgagggtagacatggcctctttccagtgaccttggatctgaggcaagg

SEQ ID NO: 10524 - DNA, 431 bp, Homo sapiens
  misc_feature (1)...(431): n = g, a, c or t
aaaaaatgggaaattttaatattaagtatgtccatgattgaaagaatcattccagaaatggcagcaaagaggctcaatgaattcattatcatttttcctttgaccaaacacttcctggagtttttctccgttgctgccaggagtgatccggaaataatatacataatgcctccccagagagggtaccacacagtcacacagatgggtgcatagatccctgctgggatcatcagaagaccccccagggcaatgtggaagagcccattcataatctggacagcccccaaagtcttagattccctcatgaagaagctttgcgtggggcccaccagtgaagacntcctcctgaagagtggttttggaccagattgcntagcaatagggcctttcattggctctgccgggaaagtcccatttactgaatttctggg

SEQ ID NO: 10525 - DNA, 378 bp, Homo sapiens
ccaaaactgcgaagagatgcagaataatgttgacaataacaagttgctgaatcgtcaggctgcagactggtgatggttaaattgaattgtgtcccagatccactgccagtaaatcttaatgagaccccttcttctaaactggaagtcgcataaattaggacattaggggctttgcctggtttctgttgatgccaggccaaccaccgatctatattctgagaggcccgacaacttattgtaactgtatctccgacagatgcagacagggtggaaggagattgggtcatctggatgtcacatttggcacctgggagccagagcagcaggagccccaggagctgagcggggaccctcatgtccatgctgtgtcctgactgg

SEQ ID NO: 10526 - DNA, 616 bp, Homo sapiens
aaaaaatgggaaattttaatattaagtatgtccatgattgaaagaatcattccagaaatggcagcaaagaggctcaatgaattcattatcatttttcctttgaccaaacacttcctggagtttttctccgttgctgccaggagtgatccggaaataatatacataatgcctccccagagagggtaccacacagtcacacagatgggtgcatagatccctgctgggatcatcagaagaccccccagggcaatgtggaagagcccattcataatctggacagcccccaaagtcttagattccctcatgaagaagctttgcgtggggcccaccagtgaagacatcctcctgaagagtggttttggaccagattgcatagcaatagggcctttcattggctctgccgggaaagtcccatttactgaatttctgggtgttgtcattttgctctcaaaactcctaaaaataaaacaaataacaaaatgaggagagcaagaacaagatttttggcagtcttaccttgtgtcatgcatctgaatgcttctctcagcatttcctccatgagtgtcattgagggtagacatggcctcttccgagtgaccttggatctgaggcaagg

SEQ ID NO: 10527 - DNA, 576 bp, Homo sapiens
  misc_feature (1)...(576): n = g, a, c or t
aaaaaatgngaaattttaatattaagtatgtccatgattgaaagaatcattccagaaatggcagcaaagaggctcaatgaattcattatcatttttcctttgaccaaacacttcctggagtttttctccgttgctgccaggagtgatccggaaataatatacataatgcctccccagagagggtaccacacagtcacacagatgggtgcatagatccctgctgggatcatcagaagaccccccagggcaatgtggaagagcccattcataatctggacagcccccaaagtcttagattccctcatgaagaagctttgcgtggggcccaccagtgaagacatcctcctgaagagtggttttggaccagattgcatagcaatagggcctttcattggctctgccgggaaagtcccatttactgaatttctgggtgttgtcattttgctctcaaaactcctaaaaataaaacaaataacaaaatgaggagagcaagaacaagatttttggcagtcttaccttgtgtcatgcatctgaatgcttctctcagcatttcctccatgagtgtcattganggta

SEQ ID NO: 10528 - DNA, 279 bp, Homo sapiens
ccatgtccccagaattgaagccagagaatcgctcagatatccctgagggccggtcgttatcaaaagagatgattaggacaggggcctggcctggcttctggtaataccagtgtacattgttactcccaatattgtttcccccacaggtaatcttggccgtctttcctggggccactgacactgagggtgtctgagtcaacacataggaggtcacagagtctgtgcagtgagagaggaggccgaggaggagaacggtccaggccatggctgaggcaccac

SEQ ID NO: 10529 - DNA, 678 bp, Homo sapiens
cctcctgctgctcctgtttgtgggactgttcatctcctacgtgatgctgaagagcaagagagtgaccaagaaggctcagtgaaggtcccgcagggatgaggctgccagccccttctctgcttcccctccagcacagggaccaagtgggggagcctgcagaacctgtccaggcacagtggctcctcaagcctgcctgtcctgcagagtccccatggcatggagcttacacctgactgactggagccccctccccgactcccacttccagaagctaggagggagggatacctggaagactccggtcacctccttcttgctcagggcctaaaagatgctggtcctcccaacctcactctcagactccctgccaccttttcccctgggttctgccgtcttgcctcacttcccctcctgtcacatgctgacgttggacttagcaggttctaaggccacatgtgtgacctctctgacttctcttcctccaccaaggcagctttccttaccctgacacagccccagaccccacaaagccttmtggacctggaaagcctggggaaggwctgacagaccccaggaccagccctggggctcagggcagccaccccgggccgctgacygactgacctctcctcacggaggcccagccccaaagccccagggctggcccgtttgggacag

SEQ ID NO: 10530 - DNA, 475 bp, Homo sapiens
aaatatggttgtacatgtcatcattaatcgattcattggtcttccacatggttatttcaatgcaagatccgatcagcatgaagagtctagtacaagataggcagacatggttatcactctgcatcaccagtcacatggttacagaaaacagaattgggactgcatagggactctactgcgggcccaacaacctattagtggattgatgtaaggcattagtaaattggcatataaaaatagcttaatgagtgatctaatccatttagaatgctgaagcacttctgtggtaaatgttagtctattctacaattgaaaatgcctcattttaccttttctctaaactgacaaatgcaagtagccagtaactgtaggtctagaattttcgttcactgaccagaaggactaataggcgtctatgtgctcagaaccaccagtcccgcaccaactctcctttcagtgagcactgtcagccaca

SEQ ID NO: 10531 - DNA, 251 bp, Homo sapiens
  misc_feature (1)...(251): n = g, a, c or t
acancctgaccatnaacagggnataaaccggtcgatgaggccgactattactgtcaagtgtgggatcgtaataatgaccatgtcgtcttcggcggagggaccaaactggccgtcctaggtcagcccaaggctgccccctcggtcactctgttcccgccctcctctgaggagcttcaagccaacaaggccacactggtgtgtctcataantgactnctacccgggagccgtgacagcggcctggaaggcaga

SEQ ID NO: 10532 - DNA, 255 bp, Homo sapiens
caacatgccttctgcatcttttaatactacattcacctgattataaatctccttctcagactctgtaggctgggcattttcaaaatcaaggaaaaaatttggcccctgctcaaggtctgtgcatgtcaaaactttaagaagattccccatgttaaggtaccttcagccagygctggbgattctgtccttgbccttctatccttggattggcgttccctctttcctagttcacttgttccagtscttcaacttctg

SEQ ID NO: 10533 - DNA, 645 bp, Homo sapiens
aaacattcaatttatttgtggcatttgtacatgaaaattatatgacgataacattgctttctattctaagctagtaaattgtttctaagaaataatagattgataaaattgcaagtcttaatacaaaggtaggttatgaaaatgtatattaatttgagatatagaaaagttttcaaataataatgttttcagggttatatgcaaatagacactaaataagacaaggtttctgcaaacatgatgtaacaataatgactggaactctgaatgtgggaaattcagaaaatgaaccagctacttaaaaagcaaaaatgtgctaagtaaatttgtattttcatggttattctaaggagaggaggaataatctgttgaggttagtgccctcaagcagaccccataactttgctacaccgcatttaacttctctgtgctgttttcttttaattttcaaaatggaaattagctgtttcattggtgaagtgcattgtaaaatgagagaattttcaaataatgcaattactctatggtattctgttttaatagtaatatacccatatgaagcaggtataatgagaataaattttgcccataacaaattctgaaatctgaagttttggttctgctgttatagtatgaattcgcttt

SEQ ID NO: 10534 - DNA, 432 bp, Homo sapiens
ccaatcatagagatatctgcaccggcctgcaaagcttccatgaacgctttggtcccagacttggcgatagtaccaaggttattgatcaagtcagccttggtcattccaattccagtatccacaatagtgagagttcgatcttgtttgttcggtataaggttaatatgcagctctttcccagagtctaatttactgggatctgtcaagctttcataccggattttgtccaatgcatctgatgaatttgaaatgagctctctcagaaagatctctttgttsgagtagaaagtattgatgatcaatgacatcaactgggcaatttctgcctgaaaggcgaacgtctcaacctcctcctcctccatcggttggtcttgggtctgggtttcctcaggcatcttggctaagtgaccgcacaggaccaacggcacagcc

SEQ ID NO: 10535 - DNA, 365 bp, Homo sapiens
ctgacatgctctcaggggtgaagaagtttagcttaaaatacctgatggcgctgcataaactggggatttgggaactgagtttttagctctgtgacacacaacataaaaaacaaaaatccagtctcattagctaaattcggattaaaatctgaaatgtttttatggagttgccaacaggctggaatgtacctgatacagtttaatctgcttttatttctttggctgtcttccaaaccactttcttcctgtaattcttaagttggctagtcctccttcctcagaaaaattacccctaagaatcttcctaatagtgagggtgtacttccgaatagaagagtccttcggctgaaatggcatctccaagg

SEQ ID NO: 10536 - DNA, 512 bp, Homo sapiens
ccatgggaatctaattaatttcataatgatgttggttgaacatgataccaaaaaatgcaggtattttcaagaacaataagatagataacagcattaaagcataatcctttaagaattcatgagaaaaaaaggatgataaaacttaagcttctttttcagatgtttaaaaatttctataaaattctttgtcccaagattaatcatataaccatggtacataaaatatgctaactacattgcctggtgtcaaggtgggaaaatcctcttttataacataaaatcctcttctaatccatgttgacccaagtcctggctgtctgagggcagattcctgtcaagagacctaaggttgtcatggaaagcatcactttcgtctactagttggtaatcctgttccatttccgttaggaagccactcccagatcctgrccagagcckgagccggagccgaagcctgatccagagtagtcctcakaaagtgggaagatacgattcaagtcctggattmtcgc

SEQ ID NO: 10537 - DNA, 662 bp, Homo sapiens
aaatatgaatttgtcttaaaggcaattcctttttgcttctgtattatctggaaaagcatgagagaggcgacacctcaacaaactgatcagagaaaataagcagttactaccctgataggcaccttcccaatcctgttgcttttgaccattgtctgtccaacggacacacctcaaacaaacaaaactaccaaatagatgacagatcagaataaaggtgagaggtctggtccccattgaaggctgctacagtcttcaaagaggtgaaggagttcataagagaacaacagtaggaaagttgagagccaagggtaggagagktgcccaaaagacttcccctactactttagggtactgaaaactcaaaggatcagctacagctttatctaagtatttactaaatgctacatgagggtgtccctgtccagctttctggcacatgagtcctgtgtggagagttacctcctcttccagggactgtgctgttgggaactttgggcaagtcacttacctctttgtgcctcaatttctgtataatatttctaagctacctcactgaggtggtatgaagattcactaatgtatgtggcgtgtttgtcaatcctccagtgaaaagcactatctagatcacattttggatcacattagccaaatgcagtaaatgg

SEQ ID NO: 10538 - DNA, 369 bp, Homo sapiens
ccaagggagtgagtgggactgaaaatcctgcccctgctccatgctgagccacatacaaagtccccccagtatattgtggggcccttctgggcagacatggagagcttctgaaagtcccacatgcatggaattattttcaagaccccgggtatgtggtctgtggtggtggttctccctgtgattatggactgagatactcatttagtcctaataagaccagagaagtacattgtgagatacgtgggaaacggctgcatcactcactgtcttgtgcatgtgtctccccaggggcattttcagatttctgccacggaggggatgctcttcgcgaagggagagtcaggtacattggaggattcattgctgtgg

SEQ ID NO: 10539 - DNA, 188 bp, Homo sapiens
ctggcatcatctgagtcttggaatagctttcttgtttgttatctgcaaaaagctaggtggcctttttagtatcaaatttcaatcttggcctcactggaaccatgctctacagagctttcccaacagtttagcaagtaagcaaaatcagcttttgctcttcatatttcgtaggtgagactggggctttt

SEQ ID NO: 10540 - DNA, 233 bp, Homo sapiens
aaaatcattcattagcaaaatatccatcaaggtagaagctgaaatcatgttgccatctgctgtgaagatggctgcagttttgatacccttatcttcattttgtaggtcctgaaggaatgaaccaactgttgacaacattggtttgactacgaattgacaacgttcttttctagatggcaaggtaagtgttaccaagggaaggccatgtctataattaactgttatttcatcag

SEQ ID NO: 10541 - DNA, 519 bp, Homo sapiens
  misc_feature (1)...(519): n = g, a, c or t
aaataaagtggttacattcaaactttaacttccttagtaccatgctgcagatttcagcactgttaaggtattgcaagaatgcccaaccctctggtgtctgatcatgtatctagcaacattgcagtatgaagaaaagagatgccccggtctcagcccatggactagttaatacagtgaagcaggttcctgtcttttacccttcctgctcagaacataaaagattaaggactaaaatcaaggaaggctgggagttttagagctggcaaaatgaagtctaaaagataaatcaaggcaaacaattactgagaacttggctgttgcttaacctggcaagtctaaaagcctttctttaaccttgtaggaattagatgcataaggtttgctgcaacatgttcatggtaaacaaactaagtagagctcttatttacaaatcttgtaacaaatacttctggaggaaaaagagaaaagaattcactaagttccanaagacaaagctntaattgccagacgtatacaaac

SEQ ID NO: 10542 - DNA, 588 bp, Homo sapiens
aaattcagaaagatgagaagctacaatgcaactttttttttaatctacagataccgccaaaagaagaaatgtttatcagattttgaatgacatagctgtaagttggcggttggcagctttccacataaaatttcatcagaaagtgaaacttgattacagcccaaactagacaaggcaattcaggtgcccggaccccgaagtccacgtgagactacaggagaacgtgcattatggtgcttgccagccagtctcttgaggaactgcctgtaacggtcacggttgtggggagaaacaactccattttttttaagtttttttttttatggtattaaatataagtcttagcacctttggcatttttgtccaaacagacttcgacatatgaagtggggacataaccctcttcatcttcatttctccgaatgcgggtccagccatcgcctttgtcttcctctatgacatacaatgtttctccttcaactacggaaatcgttccttcattctgaccttcaaatgtgtagagagctttgcacgtccctatggcagggaggggctcctcatcatcaaactcgtcgtcaaaatccgtgg

SEQ ID NO: 10543 - DNA, 302 bp, Homo sapiens
ccaaaaactggagtgctgctggaaacgcgttctgccaggctgcacagccacaaccaaattgatgctggctggaaccagaggccagaaagcctggccttgtccccatgtgggagccctgtcctcagccctcttgtccccttgagctcagtgaattcccaccaggtgcccacagctcctggacttcaaattctatatattgagagagttggagagtatatcagagatatttttggaaaggagttggtctatgcaatgtcagtttggaatcttcttgaaagtttaatgtttttattaggagattt

SEQ ID NO: 10544 - DNA, 583 bp, Homo sapiens
ctgaattaagtcccttgagatacacagatgtggtttaacttagttataacatcttgtcatctagtggcgacaaagtccagcttatgccgctgtgagcctctatttgaatatttgttgcaaatgcttgtatgccctcatttacaagcgattttaattactctcatttaatggaaacaagtccccaggaaaagaaaaagaagaaaaatgatacagcaaaccatctgaagcaatccaagtcctatgcctacagtgacccaggtctactttgctcgaagagaacactggtactgcattcaaaccacaacagaatccgtcacttaactgacctctctgaattaaactgaggtatgaatcaatttgaggtatgaacagggaaggcaaaatgcaataccagattatgaaaataaccaaaatggaaaaatttgatgtagaagatatgtggcttggattgctccacatctttggttaaaacatattaagaaaagcctttaattacatctgtagtctgaagcattctaacagacaccagtattccagcaatcttcaaaagatctgtagtggcaggaaattaacgccataaaag

SEQ ID NO: 10545 - DNA, 375 bp, Homo sapiens
aaatgttctcatcagtttcttgccatgttgttaactatacaacctggctaaagatgaatatttttctactggtattttaatttttgacctaaatgtttaagcattcggaatgagaaaactatacagatttgagaaatgatgctaaatttataggagttttcagtaacttaaaaagctaacatgagagcatgccaaaatttgctaagtcttacaaagatcaagggctgtccgcaacagggaagaacagttttgaaaatttatgaactatcttatttttaggtaggttttgaaagctttttgtctaagtgaattcttatgccttggtcagagtaataactgaaggagttgcttatcttggctttcgagtctgagttt

SEQ ID NO: 10546 - DNA, 408 bp, Homo sapiens
  misc_feature (1)...(408): n = g, a, c or t
aaactgcaannatttttacttgctagagaatctgttttaatatagtggtttggcctctgattatttataggttttataaattttagaatcaatttctctttaaggtggctcagatttttcaactcttgtgcacataaaattgagttgaagttcattgtgcctttttttctttatccaaattttgagttaaagcttcatatggtaactgcatcctgttcggacactatagtctaaatttttgaaactgtgtggtgttcgctaaaagtaggaataacaacgtaaaagctaattaaggtcacaaacttcagtgaaacccttaaaagtccaaatcttcttgatattgtgaaccgtaccccttccagtttagtttcttctggactttccttacttaactgacagttacctttt

SEQ ID NO: 10547 - DNA, 332 bp, Homo sapiens
ctgtgcctcatcagggcagaggttttagtcagtatggtgtgagtggctcaccaacgaaatctaaagtcacaagttgtcctggctgtcgaaaaccacttcctcgatgtgcgctttgtctcattaatatgggaacaccagtttctagctgtcctggaggaaccaaatcagatgaaaaagtggacttgagcaaggacaaaaaattagcccaatttaacaactggtttacatggtgtcataattgcaggcacggtggacatgctggacatatgcttagttggttcagggaccatgcagagtgccctgtgtctgcatgcacgtgtaaatgtatgcag

SEQ ID NO: 10548 - DNA, 389 bp, Homo sapiens
  misc_feature (1)...(389): n = g, a, c or t
ctgatgaatgaataaacaaattgtggtatctccacacggcacaatagaatattcagccataaagagaaatgagggactgatacatgctaaagcatggatgagccttgagcgcatttttgccaagtgaaagaaggcagacacaaaaggcaacgtattgcatgagtgcatttatatgaaatatccaaaataggcaaatccatggagacagaaagcanataaatggttgtaagaagctganagaaaggagtggggagagatngctaaaaaggagtttccttctagggtgatgaaaatgttctggaactacttattggggatgattgcacaacatggtgaaggtactcaatgtcnctaatggtaaatttcacatacactttaccataattttt

SEQ ID NO: 10549 - DNA, 358 bp, Homo sapiens
aaatgaagtaacccctaaactcagccagtcccatgtttttttaacacttggaatatctaattccatttacactgcattcttcaaatgtaattttcaaagatgccttttgcctcatcccttgcttttaagtattattatagacttttggaaactcacgaaacaagcaatccctaaattctcgcccaggaaagtatcttggattaaatggtttttgagaaccttgagagtgtatattctatgaaatggaagaaacaagaactagacagagtcacaaatgctgttgatcacagacaatctctgccatccataaggtaaatgtaatacatctggcgacctgctgagtgtgaacttgcagcag

SEQ ID NO: 10550 - DNA, 298 bp, Homo sapiens
aaaacataaattaataatttccagtggattcccttaaaaagattacagcagggatttccagatcgaacccacccccacctctagagtttttggctgttttctaaagtcttgaattcaatgaggtgaaggaggaagaaagtgtttaggaagtcagtgggttccagaagagctggtgctgggtggggcagagtggtgagagatgctcctttcaaatggaaggctctggaacccgccaaaagggagtgcaagctggggcaatcttcctggacagccaccagagaaaggcgtcagaccccac

SEQ ID NO: 10551 - DNA, 530 bp, Homo sapiens
ccatgcagtgtgcgacagttcaggacgggtagggatgggtcccattctgtctgggtcaagggctctatcagcttcttccatgtgcctttgggaagaaatctcgttactttaagtttgctttcctgttatcttgatgaagtgcccattttagcagacacttgtagtgctgaccacttaggaaatgtacaaactcctaagcttctaaagggaggcatggcaaaaacgttggggtcaggatgtctctcacgctgctcatgttaatactattaacacatgatttgagaaataagttttctctaaaatgcatattttgccgccacacactgaacaatattatttccagtgaagtttgatgcctgttcttacgttgtgttcacctgttggttcaccactcagcagatctgattctgcaagaattaatggtagaactagatcatcctttctaacagacgagcctgtgtcctgtgacggcctttcacagcggaatgcagttgtacctcacattacttttgaaacttcactcgttccag

SEQ ID NO: 10552 - DNA, 274 bp, Homo sapiens
ccgaggctgtgcctagagagtggagatttttgatgaaaggtgtgctcgctctctgcgttctatcttctctctcctccttgttcctgcaaaccacaagataaaggtagtggtgtgtctcgaccccatcagcctctcacccactcccagacacacacaagtcctcaaaagtttcagctccgtgtgtgagatgtgcaggttttttctagggggtagggggagactaaaatcgaatataacttaaaatgaaagtatactttttataatttttcttttt

SEQ ID NO: 10553 - DNA, 363 bp, Homo sapiens
ctgaaagaggactaatgaatccactcgctgccttaggtccatagctcagtgaagcaatgaagtagtccaaattgttgctgaggaaggatgcaatctttcctgctccatttgttaatgccactactgatgacaggatacagtcattagttgttatcagcttctgtattgctgttggaagttcatgctctattgcagctttttgactataatgtttggaaatatctttcataacgtcatgaaatccatgcagagcagcaccaacatttgttaacacagaactgtagtttgtccgaaggagtccatctggctctgtacttgacaaggcaagaagagctatgtaagtctgcagcttctcaaacacag

SEQ ID NO: 10554 - DNA, 364 bp, Homo sapiens
ccatatgactcctggggccacctccacgacggcccagccccaccgacgctctgctgaaaatcctgcccctcagcaggacgcaagcttgttccccaaatagtggtgacctcaaactgcaatatgatgaaacctgcagccaacactgccctccacaagggtttctggaaaggctgaagctggagacggtaaaccacaacaccgtcccaggtcactccaggtcaccccagctaaagacattcaacaccagccaaaaggctaaagtttagtttgaagggttcaaaggcaaatacactgaaacccacgtgtaaacctgcctggttttcaaactggaagagaaacactttggtgtcttcaataacccagg

SEQ ID NO: 10555 - DNA, 509 bp, Homo sapiens
ccaaatctcttatccaatggaggtactgagtggctggatcagttaccatgcaagctcacgatgaatgagattgaatttggttctgtgtgcacactgggctctggggagggaggacacccctgtgtgttgctgctgccttccgtgctgtctactgtatccttcatgtgtctccaaatggtacacgccccatgggattacagaacacagctacagaattaggatctcatggtaacaatgaggaattaggttactgtagaactaaaatatgtttaatgaaattaaaatgcaatggaaaaaaaatcaggcaacagaacattctgatgaatttacaggactgattatatcccacggcactgaatgacaaacagttcttctccatacagtcgcaattagaggcatagaagtcatactgaatgctgaatagaagaacactgagaagagcaggttataaatgaaggttttcacattaaacagaaaaatagacaaaatcatcggtaagaagctagctt

SEQ ID NO: 10556 - DNA, 334 bp, Homo sapiens
aaacagcaccagcacttctggctggtttgaaccttaaatgccaccacccaccagagaggaggctctcactagattctaaatctgttatttaattacttttcaattgaaaaacaaaacagacagaagaaacttattagaataaggccacctaggaatgttcttaacttttccattcagcttttggctgatatatgaaaatacaaataaatacatcctttccccaggtgcaaggctaaaccagcagctccaagggcttggtctacagtgctcagaaagacacactgccttaaaagtcaggctagtgccctagctccggtggcctctgcaaatgagg

SEQ ID NO: 10557 - DNA, 546 bp, Homo sapiens
  misc_feature (1)...(546): n = g, a, c or t
ctgttctcccttgaggacctggtcaggatcaagaaagggctgctggcacccttactcaaggacattctgaaagcttcccttgcacatgtggctggctgtgagctgtgtcaaggaaagggctttatttgtgaattttgccagaatacgactgtcatcttcccatttcagacagcaacatgtagaagatgttcagcgtgcagggcttgctttcacaaacagtgcttccagtcctccgagtgcccccggtgtgcgaggatcacagcgaggagaaaacttctggaaagtgtggcctctgcagcaacatgatgcccctgagtactgtgaaaaagactgttcaacatgccttatgataacaccgatttgtgtctattattggtgacattgttttagatattgggtattgtatattaaggaaaaagatggtctatattctctttattgcatatacttaatgtttcaaaagaatgcagattctgtgtttaagcacagggctgatagttgtggttttgtttacnaatgttctgttttggctgctattggtttttt

SEQ ID NO: 10558 - DNA, 499 bp, Homo sapiens
ggccgactcgcaagatggcgccgcagaaagacaggaagcccaagaggtcaacctggaggtttaatttggaccttactcatccagtagaagatggaatttttgattctggaaattttgagcaatttctacgggagaaggttaaagtcaatggcaaaactggaaatctcgggaatgttgttcacattgaacgcttcaagaataaaatcacagttgtttctgagaaacagttctctaaaaggtatttgaaataccttaccaagaaataccttaagaagaacaatcttcgtgattggcttcgagtggttgcatctgacaaggagacctacgaacttcgttacttccagattagtcaagatgaagatgaatcagagtcggaggactaggcaaaggctccccttacagggctttgcttattaataaaataaatgaagtatacatgagaaataccaagaaattggcttttagtttatcagtgaataaaaaatattatactctcgaa

SEQ ID NO: 10559 - DNA, 455 bp, Homo sapiens
ctgtcaccattctcacgtgattcttgtgagactctttttggttataattactatttaatatttagactattttactgagcagactttataaatgagatatctacaaggcacttaaagtgttacagatgttttaccttaagaattatttaagttgtgttgggttaagacagttttcagtgtaccgtaaatgttgtgttttcagaaaaagacaaaacgatggtgctgactggttttctgtatattgcacaacagtcctcaaatacactgatgtatgaaactattcatacatcaagcagcatttttttcactctccttagaattggaactatgcagttaaggcagataaaatgtacagatgtttcatatattacaggttacatatataaatcaaaatttcctatataaaactgatttgggatttggggtggaaatattttgaatattaatttattttt

SEQ ID NO: 10560 - DNA, 476 bp, Homo sapiens
ccacagcatccccacgttctgagaagtacttggaaatggttgtctggaaagcttccactttggtcttgacggcattcaccctctccagcaccttctcctggattgctaccccaaaatcatttccatcttcaatcttggggatcaggtgttggatccatgtaatcaccagaatgcatttctctttgagagtccagacttctggcttaaccagggcaagcagggacaggactttctcattcccagggagaaatccacacttagggacttctttcttctcctgcttatctgtttccatctcatcatccttgggtggagggtctgggatggggatgtccagtggggcccggagggaagtcaagtcagccacattgagggagtcctcttgcaagagctgattcaggtatatgattttctgtggcaagaatctgtagaggaattcctcagcctcctggaaaagattctgcctgaagtcctcc

SEQ ID NO: 10561 - DNA, 729 bp, Homo sapiens
  misc_feature (1)...(729): n = g, a, c or t
aaaatgcattttcccttgtcctgtctttaactagatatacatgcttatatttatagtgggtttcacagactataaaattgaatgtatgaaatttttatttatatcagtgcttttaataatgaagatatttttggagtaatggtgctgtcttgtagcgagttattaatcatagtaagatttttttctcttcatttgctttttttgtttcatattaacaattttttttttacacggacacaaccctctgacagtctttccaaatattaaaatcatttgaatatgtatgctgtgatctgaacactgctcaagccatcaagcagtcttcatacagtttgcattataaaatctcattaaattctccaagaaaaaataagttgaagaattttatttcctgaccatgcatcccctggatttctgagtttcagttcagattgtagatgacaatataagctgccttccgaaattgtcaacatctgaatgttaagtccattttccccatggaagaagcccgtagttccatgaagtatggattaccatttgtatttttcactaacagtaaatgtatttttcttattaattgtttgccttaggaatgatgaattacattttttgttccttcttaccataaacatctgcattcctcagctcagccttccttgtatgttgtttctttataaatggttgagctgctgatgcaggtattcccaagctancagtacaaatcatttt

SEQ ID NO: 10562 - DNA, 384 bp, Homo sapiens
  misc_feature (1)...(384): n = g, a, c or t
aaaatattttaatcaggcagagttttatggatagagaatagaagagaaaggtagtaaatattgaacatattccaatataggaacctatctctgttttagtacaaaatatttctgacatctgaactagaggtcaagagaataaattcatttgtatacatctgagcaacctgtctttcagatgataaagtatctagccttttctgacaccataatagttcattttgtagggaataagccattaggtgtatataattgctttctagaaatgacctaatgtccccaaccactttgtagtggcagatcactgtttcacagcatattttctcccaaggaaagtattcaaaagagactgcaactaacannactcttatttcatcaaaattt

SEQ ID NO: 10563 - DNA, 377 bp, Homo sapiens
aaaagagcaaaatgtttattttttatatatcttcttagatgcctataaaactacaaagaaaattaccctattccactgaaaaggagagcagagaataaattaaacctttctactatatgtgcctttttttcaactatgctaacttaatgctgtacatgtaatttcacttttcagattaacattgacagttcgacaagagagactatcatcaggaacattcaggaacccactgaaacatgttttgaagaagctcagaaaatagtctatatgcatatggaaagggattcctaccccagatttctaaagtcagaaatgtaccaaaaacttttgaaaactatgcagtccaacaacagtttctgactacaactcaaaagttt

SEQ ID NO: 10564 - DNA, 467 bp, Homo sapiens
  misc_feature (1)...(467): n = g, a, c or t
aaaagtattttctctacagagaatcttatcagctatacaaaaatntgtacagtttttatactgaagctagtattgagctgcacttgaattcacattcttagcaaaataattgcctgagcacacacacacattccacacgcatcattaaaggatagccatttattcttcatcttcatcctcttcctcctcatcttcatcttcttcttcctcctcctcctcctcatcttctggttcgttcttcttctttgagcctgttggcctgccagggcccttctttcctgcttcacttttgcccttggcacgatatgcagcaatatccttttcatatttctcctttagcttagctgctttctgttcatatggntgtttatctttggctgactgctcagaccacatttcacccaatttctttgcagtatccccaatggataggccagggtgttcacttttgatctttgggcgatgtt

SEQ ID NO: 10565 - DNA, 350 bp, Homo sapiens
  misc_feature (1)...(350): n = g, a, c or t
aaagaacagagttctggagtaaagaagcaggttcccttttcagtagacacctcccgtctgctgttggaacacatcaattgtatcttcatcctccatttccaactgtgcaggtgtgtctgtttcattgattggttgcccgtcaaatcggaatntgatctgcctcattgacaatccctgtcgttcacaataggccttcattagtttactaagtggtgtatgcctcttaatcttaaactgcaccacagaaccatcctgccccgccaccttcaaattaatatgatcgttgttctcagtcttgactctttccttgggcttttcgtcggccatggcgagcgccggagtctcctcag

SEQ ID NO: 10566 - DNA, 270 bp, Homo sapiens
ctgaagctgcaggtgctgatcgagtcaaagagccctgacatagccatgctttttgaagaagcctttgtgcacctgaaaccccaggtttgtctgccattgtggatttcctgggcagagtggagtgaaggtgccaaaagccaagaagacactgaggcagtctttaagaaagctctcttagctgtcataggtgccgactcagtaaccctgaagaataagtacctggattgggcttatcgaagtggtggctacaaaaaggccagagctgtgttt

SEQ ID NO: 10567 - DNA, 465 bp, Homo sapiens
ctgcctataaaactagacttctgacgctgggctccagcttcattctcacaggtcatcatcctcatccgggagagcagttgtctgagcaacctctaagtcgtgctcatactgtactgccaaagctgggtccatgacaacttctggtggggcgagagcaggcatggcaacaaattccaagttagggtctccaatgagcttcctagcaagccagaggaagggcttttcaaagttgtagttacttttggcagaaatgtcgtagtactgaagattcttctttcggtggaagacaatggatttcgccttcactttcctgtccttaatatccactttgttgccacacaacacaatggggatgttttcacacactcgtaccagatctctatgccagttaggcacattcttgtaagtaactctcgatgttacatcaaacattatgatggcacactgggcttggatataatagcc

SEQ ID NO: 10568 - DNA, 678 bp, Homo sapiens
ccttgatgataccattatcctcattatagatgatgcacgggcccctgcgctggatacggcgacggtttctcattttgcctttgccagctctcattcgctgagaggcatagacctacaaagtgagcagttttagtattctgattaagatagaatctctgcaatagatcttcagagttttaattcctttttacagatgattaaactgggcacaataacttgccaaggttacacagagccataaacagcagttaggattcaaacccaagtaatcgggctctgaggttcttgttctctcacacattaaggcttagctatactgcccttatcttctgaaattcaaagtgacaaactgtgaacaaggagtaccaaactgtaaatgtgctcattgaacggacctttttgatatcattccaggctttaagtttcttaaggagcaaaacagcttccttggtcttcttgtagccttcaactttatcttcaactaccaaaggaagttcaggaacttcctcaatacgatgacctttagacatgaccagtgctggtagggctgaggcagccagggcagaacagatggcgtatcgtttttgggttgtgttcactcyacgatgccaacggcgccaggttttggttggtgcaaacattcggcctccacgacacatgtttccaaaagcaccctgg

SEQ ID NO: 10569 - DNA, 471 bp, Homo sapiens
cgccaatcttcgctctgaggtgctgtctcaccggtgagacctggaagcgggcgagtctcgtgctgtgtcggacctgcagcccctggccttccgccaccatggagtacctcatcggtatccaaggccccgactatgttcttgtcgcctccgaccgggtggccgccagcaatattgtccagatgaaggacgatcatgacaagatgtttaagatgagtgaaaagatattactcctgtgtgttggagaggctggagacactgtacagtttgcagaatatattcagaaaaacgtgcaactttataagatgcgaaatggatatgaattgtctcccacggcagcagctaacttcacacgccgaaacctggctgactgtcttcggagtcggaccccatatcatgtgaacctcctcctggctggctatgatgagcatgaagggccagcgctgtattacatggactacctggcagccttgg

SEQ ID NO: 10570 - DNA, 411 bp, Homo sapiens
ccacatatgcccctgtcatctctgctgagaaagcctaccatgaacagcttactgtagcagagatcaccaatgcttgctttgagccagccaaccagatggtgaaatgtgaccctcgccatggtaaatacatggcttgctgcctgttataccgtggtgacgtggttcccaaagatgtcaatgctgccattgccaccatcaaaaccaagcgtaccatccagtttgtggattggtgccccactggcttcaaggttggcattaattaccagcctcccactgtggtgcctggcggagacctggaaatgttcatgaatgtttgaaaggaacaaaattatcagggatggctctttgccatgggtcttattttcaccctcttttctgtaagaaaaaagaacaatgtcttaatgtattttt

SEQ ID NO: 10571 - DNA, 303 bp, Homo sapiens
tttttttttccaagtaagcgtctatgcaggcatcacaaactttggcggatacagtagatatgtatttctttgatgctgaaaggtcagtccctaagacaaaatcaaatgtctcaaagaattaaaagcaaaatgcatgtgtcttcctggcaaaggtttccatttgcaatgtaatctgcatttctacaaatactcaatgtccaaggccactagagggtgaaaaaccagggcagcgtcttccagcaggggtcagggcagacccagagccaaaactccatcctcagcccaaccttggaggcccagcag

SEQ ID NO: 10572 - DNA, 582 bp, Homo sapiens
aaattgatctggtgttccttgcggggcttcaattgcatctaaataratgtgagagttgaaagacccataaggggcttctctcgctttacgatgtcttattatttttttttccttcctctggttgatgaaatgccagggtgaaagggatagccaaataggctaaagcacaagtgccactctagttattcsgcagagtgcccaataaaggtccacgacaataccatcacacatccgctcggggatgaacaagggctgactgactgataagytcttgaaaattcttaagctcactgcatcccttcaggtctccaaggaatgctaagtctcctccctgccatgagagacatgaaatgaacttagtgttgggagacggaagctggacggccctcaggggctgacccgcagggactttgggatatagcagagagagcttggcatgacttattactccaagctgtagaaacctggaaaatagctaccctgcagcccatgcctggtcaactggaggaccaccttagtggaagggggacaatcagggcctctggcctgccatgtgcacaagcataacaattgcatttgttt

SEQ ID NO: 10573 - DNA, 339 bp, Homo sapiens
aaagaacagagttctggagtaaagaagcaggttcccttttcagtagacacctcccgtctgctgttggaacacatcaattgtatcttcatcctccatttccaactgtgcaggtgtgtctgtttcattgattggttgcccgtcaaatcggaatctgatctgcctcattgacaatccctgtcgttcacaataggctttcattagtttactaagtggtgtatgcctcttaatcttaaactgcaccacagaaccatcctgccccgccaccttcaaattaatatgatcgttgttctcagtcttgactccttccttgggcttttcgtcggccatggcgagcgccgg

SEQ ID NO: 10574 - DNA, 202 bp, Homo sapiens
aaatcaataagtaatctaggactagcattatgtttgctagacctggcatttgctcggtacataaggttcaaagtttcctttcctttttttatttattttatattttgcaatgttttttttccataatatttaagtttttcgatgtttagatatttttcttcggtgaagcacaagtttcttttcatggtccctgatcaatttt

SEQ ID NO: 10575 - DNA, 305 bp, Homo sapiens
ctgagaattcgtccgctcccgaggctgagcagggcggggctgagtaaatgccggcttaccatctctaccatcatccggtttagtcatccaacaagaagaaatatgaaattccagcaataagaaatgaacaaaagattggagctgaagacctaaagtgcttgctttttgcccgttgaccagataaatagaactatctgcattatctatgcagcatggggtttttattatttttacctaaagacgtctctttttggtaataacaaacgtgttttttaaaaaagcctggtttttctcaatacgccttt

SEQ ID NO: 10576 - DNA, 231 bp, Homo sapiens
gagacaatggccccgatgttatggagcccgaaggcgtcatcgagagtaactggaatgagattgttgacagctttgatgacatgaacctctcggagtcccttctccgtggcatctacgcctatggctttgagaagccctctgccatccagsagcgagccattctaccttgtatcaagggttatgatgtgattgctcaagcccaatctgggactgggaaaacggccacatttg

SEQ ID NO: 10577 - DNA, 453 bp, Homo sapiens
cctgcagcatgggaggtaccacgctggcagtcagcagtcacaccagggtggtcagagacactggtggcagcatctgtgcttgcaactgcattcccagggtgtctgttttgttcccaagtgtctcccacaaaattccccaggaggttctccgattaaatgtcctcagggtgaaaagcatggacaccaaatcactccgtatccacttccatgagatgtcttgatgctccagttcaatgagtaacaatttctcaagaggctctgattagttcattaaaaaataagcacccccacctcattccccgtgatacagcacatctagtaatctaggcgcctcagctaagctgcatagctcttagcacacaggacaggtcagcgttcacacatcaacactataactatgcggcggaactagctccccgctagccgtcaactactcaggagactacctgtgag

SEQ ID NO: 10578 - DNA, 430 bp, Homo sapiens
aaaacgggggggaacggggaaacgagctgtatctatggttcacctcattcaacttccttgagttatggcactatgatgttgcttaattaggtaagacatggatatttgcaccgagtgcaaatactgttcataacaaggtcatagctagaaagacagatgggctcaagtgtggacaaataatgtcatcaaggtaatagatcaaaaatattaaagccctataaaagatctgagcagtcaactccaaaacatccacatgacaaagtccttaaaatacaaatctcattactcttactcatgcaactgctaaaaaatagtgtgcagatatgtatttatatttgccttaaccttcaaaatctagggacataaatcttgctttgttaaaaaaaaataaaaaataaaaatagacaggaatttgctacacttttccttc

SEQ ID NO: 10579 - DNA, 342 bp, Homo sapiens
  misc_feature (1)...(342): n = g, a, c or t
ctgctgcccctnagtnttctttccttctccttttcttttcctttcttctctcttgtgcattcttcaggtcagtcatcacattcaaagtcttccatacccacataaccacaatgatcatggcattcaccagcagtggggctgaaaatactatagaaatgaacatccccctggagtccgaaatactggtatttcgaaaataatctccagttcatcgcagccgcctcattgatgtattcagcacagtagactaagatgactagacacagaaagngccccgatctgtacnctgtagctncgggaggacaagcaggngaggagcacgcagagccgcgtggaaggngg

SEQ ID NO: 10580 - DNA, 653 bp, Homo sapiens
  misc_feature (1)...(653): n = g, a, c or t
tttttccgcccatgttagcattgaagttgtgagctctacttgcttgtctttatggccctttaattcaagtaattggtcagtatccgtatgggtcttttataccacccgctgggggctaaactaatttagctgctgctgtatacttactaacaaggaataaatgttaagctttcttctcagtattgatggatggtatctaaaagtatttttatgtttctttaacatggcttaaattttgaacttaatgtatcaagttagtatggtcatattaatacctgtgcttttcagattcttcaaacacctaaatgaaagtgataaattcaaaactgatccttttagttcctcattatatgatatgaagggattaactgtagcaggatagtcaacctgaccgtacggcatggtgctttttttcaggataaatcttcagacaaaaaagtgcaaacaaaagggaaaaggggagcaaagggaaaacaggccgaagtggctaaccaagaaactaaagaagacttacctgcggaaaacggggaaacgaagactgaggagagtccagcctctgatgaagcaggagagaaagaagccaagtctgattaataaccatataccatgtcttatcagtggtccctgtctcccttcttgtacaatccaganga

SEQ ID NO: 10581 - DNA, 278 bp, Homo sapiens
  misc_feature (1)...(278): n = g, a, c or t
ccttcaacagactggatggggtccacccacattagggtggagtttgttctgccactgtgcagttatcattctgggatgggggtaccttactctcccaatgagaaattctaaatttcctcttttgagcctggtgcctccaccttctcanaactgcatagggcgtgagctttgttggtgatgtgacctccagaacagactgtgagcagatttttttctttaatcctgagcctatgcttgctgctgtccttcttgactttcaactaggcctaaaaaagcgn

SEQ ID NO: 10582 - DNA, 523 bp, Homo sapiens
ccagggttaggacattcaaatgtctttatccacattcctgaaggataattgttatagattccctacctccataggaatgcttataatggattatctatacaatctccacattcccacattttgcattagagaatggaatcagtcaaaccctgttcccagagtttcccttagagttctcacctgttgtcttatatccatctaggaatccccatctctaatgtaagcttggagatccgggcccccgggggacaggtgactgaaggacaaaaactgatcctgctctgctcagtggctgggggtacaggaaatgtcacattctcctggtacagagaggccacaggaaccagtatgggaaagaaaacccagcgttccctgtcagcagagctggagatcccagctgtgaaagagagtgatgccggcaaatattactgtagagctgacaacggccatgtgcctatccagagcaaggtggtgaatatccctgtgagaagacctgatggctatagaagagacctcatgacag

SEQ ID NO: 10583 - DNA, 505 bp, Homo sapiens
  misc_feature (1)...(505): n = g, a, c or t
ccacattgggaattctgcacacaggtgcctgctccaccanncagagaggctcaggagattgtccagggacaaggagacctggccggacctctgcagggaggtgaggcccctgcccccatcttgtcccatcacattctggatgtttggcatccccaggctcctgggaggggagaagtgctgataaaaaggccaaaaatcacacagaaagaagacagaaaactccacgcacttcctacataggtgctaccgtattcctacgagcacggggcctgtgttgaagactccctctggaagttacagaaggaagccaccaagagttcagcctcacagcctctttctcagatgcagtcaccactttaccaaacttggcacatccaaccactcctttcataattttacacctgtttgtggcctggctgacagatattttgtnattgatctttctaatttcagggattctaaatgtgttttgagaatctggtcagcactcanggattctgtcttt

SEQ ID NO: 10584 - DNA, 240 bp, Homo sapiens
  misc_feature (1)...(240): n = g, a, c or t
ctgctgctaaatacctntgagaaactctgcttctatctaaggggacctacttttntcnggaatctcaatacttggaacaagaacctcctanacggaccctttggcataatgaattggaccaactgtaggttccaggactagagagccagcaatgcctccatgaacaatctcacccaattactctgctcaggaaacgaggtaactgatggacagccgaggcagccccttaggcggcttagg

SEQ ID NO: 10585 - DNA, 666 bp, Homo sapiens
  misc_feature (1)...(666): n = g, a, c or t
aaaanaccaatagcagccaaaacagaacatttgtaaacaaaaccacaactatcagccctgtgcttaaacacagaatctgcattcttttgaaacattaagtatatgcaataaagagaatatagaccatctttttccttaatatacaatacccaatatctaaaacaatgtcaccaataatagacacaaatcggtgttatcataaggcatgttgaacagtctttttcacagtactcaggggcatcatggggctgcagaggccacactttccagaagttttctcctcgctgtgatcctcgcacaccgggggcactcggaggactggaagcactgtttgtgaaagcaagccctgcacgctgaacatcttctacatgttgctgtctgaaatgggaagatgacagtcgtattctggcaaaattcacaaataaagccctttccttgacacagctcacagccagccacatgtgcaagggaagcttgnagaatgtccttgagtaagggtgccagcagccctttcttgatcctgaccaggtcctcaagggagaacaggtggagctcatcagtcaagtgtcccggccctgccctacaaactcctttaatgcactgttagcaaacctacaggtcttcaacagcttcttgatatggaagagctgctcctgaatttccttc

SEQ ID NO: 10586 - DNA, 443 bp, Homo sapiens
  misc_feature (1)...(443): n = g, a, c or t
ccaaaaacttcagcataaaaactatcctgtctgtgtattatatatatttattacnnnatttaataaacaaaaaccacttttgaaccaggtaattttatctagtgtgaaaagaaattaatcacatggtcatatactggctagtgctctctaaaagtagacattaaaatatttcataattggagggaatctttggagattagtggcatctaatcttggggcctcagacacccaaaatctatatattgaccagtggaagttgatgatttgttatcaaatttcaaagcacctaatggaaaccccacttcatctctgtgaagattttcagtncctttacagttatttgaaattatttcaattctgtggagccacttcagaaactccaatgggcctttgcaatattaaaatgtggagaatgcattaatcattatttaatcaatgagttt

SEQ ID NO: 10587 - DNA, 631 bp, Homo sapiens
cctctccacaggctgcttgagtgtcctcatgacacaacagttggcttactccagagtgagcaactcaagagagagcaaggcagaagctaccaaatctttatgtttgaagtcatgcaccatcttttccacgagtatcctgttgattattttgatcagcttgttcagtctgggagggaattgcacaagggcatgaatactccactggcaaggatcattgggggccatcttggaagctgtgtgaatgagcaaatgaatgcacagatagaatattagcagtgacaatgatgctagaggtcacctaccccactgtcctcttgtccttctcccccaaccctcccctgctcccaggcaagaagccctctagcctctgcttgatcactttcagcactcaacatcttcagggaacctattccgccgtgggacagtgttaattagtggaaaactctttttcaaaagttgaaatcagttcctctgtgtctattacctgctgatcactgtccagacttctggaggacacagagcaagttttattcctcttactgatggtagcctttcagatccatcccttccctccagtatattagagttacgtaaattcttaaaatgcttagcagctcatttatcctgaaca

SEQ ID NO: 10588 - DNA, 510 bp, Homo sapiens
  misc_feature (1)...(510): n = g, a, c or t
aaagacatgaaaaatatcccaagatcatactagatcataatagcaattcctttacaaatgaattatggaggtaactgatctctaacagtttccttcatgttgttttaatgcacaagggcagaggatctgccgacccttggaaccagcgtgagctaaccacgtgctatagacacttcatggtgtcgtacccagggaagtcaaagcgctttgctccctcactgtctgtgagtcctcagccattagtagcccaccccccgctgctccaaaacttgagttgtttcaaatgtttctcactgttcatctctncactgaccccactccagaaagcctggagagaggccaagatgccacccaccttccccaatccctcgccacagatctgtgtctatcacacactctgtaagtgccgctttgcttcttcctctcttgaaaagactgagaacacacattttaacatgttangaaaatggggcaggctaaaaaatgactgatcccaccgccagtgactca

SEQ ID NO: 10589 - DNA, 401 bp, Homo sapiens
  misc_feature (1)...(401): n = g, a, c or t
ttgaatgctctattttgcnntaannntttattnactagtctcagtaatacattagtaaaaancatgtcncttaattaattgggttanaatcaaanaaacatanagtngggcaatatacttnatcctacccatcccacccaaatcttactctactcatntcattctcattaattttgggaaancatnanaanatgggttcgttgagtaananattaaaanaaataagctttttgatccctgccaacaccccatgcccaggggggncaccctccaatacaataacatgccaggaanagtaagntgccctttctgangccgnaatctgccatcatnttcccatnttccagnctntttccattgcnagncacaatctgggtctcagggatnatacccggtcttag

SEQ ID NO: 10590 - DNA, 135 bp, Homo sapiens; identical to SEQ ID NO: 322

SEQ ID NO: 10591 - DNA, 420 bp, Homo sapiens; identical to SEQ ID NO: 364

SEQ ID NO: 10592 - DNA, 306 bp, Homo sapiens; identical to SEQ ID NO: 484

SEQ ID NO: 10593 - DNA, 404 bp, Homo sapiens
gctggagcttcactgtgagtccctgagaggctccttcccgatcctgtactggttttatcacgaggatgacaccttggggaacatctcggcccactctggaggaggggcatccttcaacctctctctgactacagaacattctggaaactactcatgtgaggcttgacaatggcctgggggcccagcacagtaaagtggtgacactcaatgttacaggaacttccaggaacagaacaggccttaccrctgcgggaatcacggggctggtgstcarcatcytcgtccttgywgctgctgctgctctgctgcattacgccagggcccgaaggaaaccaggaggactttctgccactggaacatctagtcacagtcctagtgagtgtcaggagccttcctcgtccagg

SEQ ID NO: 10594 - DNA, 639 bp, Homo sapiens
ctgggcatcaccaagtcacagtttccagcgtgctgctcagccctccgagtgtgtgtgctcatccttttcatagaagtcccatcggccatggagagggttgggctgcagagctgtgattgccagaggcccttccttgagaactgtggggaaggaggccctgggggtttcttctgtaggcagagctcaggccccagtcacctctgccaccctcagcctggcactgttgtgccagagcctctgctgcctctctcttcctacccatctgcagaccagcagaatattctccccctctcatcaccaaccaggagtttggtgtggtttctggacacggccagagcaggtcactgcggggctggttttgctgggcttccctgtcaaagcaatgctaacgtccagctctcgactcaaggccaggttcttctcccacttgtggcctcttgggcttggaggctgagccaggggctcctctcctgctggccgtccaggaacaggacatcttcacatcctcagtcttccaaacccggaccatgccgtcttgactcccggtgatgatgatctggcttgtgtcccatgctgggccctccatcaggcagcaacaggttatggctccttctgggccccaggctgtggtgatgctgg

SEQ ID NO: 10595 - DNA, 581 bp, Homo sapiens
ctgtctccactgtggagttactatttttccttttccccattttattcatcagaagccagtcactaagcgaggtcaaactccaggacaggggaattaagtgccaccttctggagagggagcattcacatttattacttgggatccttctgtaaggaagagctgtttctcctctaaaaaactctttaatccttttaagcctcaatttcttaattgtgaaatggggctaatacctgtatccaaccaagggagtagttagaaggtaacatgataggtggaaagcacttaacataggcaaaatgttattatcaggaatgatcgagagacccatccaactatctgaaggagtcacttaactctactgtactgcaagcgctgtaaagtcttgcatctttcactgggggtaaaggcccccagtccctgagacgggccagtttggaagacaggctggttttttctctgttctcctgagagcccttcagatgagaagggaggtctggagacagaatgccaaaagcccattaaaggcacggccttgcatttcagagagggagcaggtctagagaagaaccagaggagctcag

SEQ ID NO: 10596 - DNA, 256 bp, Homo sapiens
ctggyctgtgggtgatcccagctcttactaggagagggaastgaaggtcytggtgccaggggcccaggccctccaaccataaacagtccaggatggaacctggttcacccttcataccagctccaagccccakaccatgggagctgtctgggatgttgatccttgagaacttggccctgtgctttagacccaaggacccgattcctgggctaggaaagagagaacaagcaagccggggctacctgcccccaggtgg

SEQ ID NO: 10597 - DNA, 2154 bp, Homo sapiens
gatgcaaggagatgagacagttaaatttacttcctcttttctaatctgagaggtttcatgttgaagaaaatcagtgttggggttgcaggagacctaaacacagtcaccatgaagctgggctgtgtcctcatggcctgggccctctacctttcccttggtgtgctctgggtggcccagatgctactggctgccagttttgagacgctgcagtgtgagggacctgtctgcactgaggagagcagctgccacacggaggatgacttgactgatgcaagggaagctggcttccaggtcaaggcctacactttcagtgaacccttccacctgattgtgtcctatgactggctgatcctccaaggtccagccaagccagtttttgaaggggacctgctggttctgcgctgccaggcctggcaagactggccactgactcaggtgaccttctaccgagatggctcagctctgggtccccccgggcctaacagggaattctccatcaccgtggtacaaaaggcagacagcgggcactaccactgcagtggcatcttccagagccctggtcctgggatcccagaaacagcatctgttgtggctatcacagtccaagaactgtttccagcgccaattctcagagctgtaccctcagctgaaccccaagcaggaagccccatgaccctgagttgtcagacaaagttgcccctgcagaggtcagctgcccgcctcctcttctccttctacaaggatggaaggatagtgcaaagcagggggctctcctcagaattccagatccccacagcttcagaagatcactccgggtcatactggtgtgaggcagccactgaggacaaccaagtttggaaacagagcccccagctagagatcagagtgcagggtgcttccagctctgctgcacctcccacattgaatccagctcctcagaaatcagctgctccaggaactgctcctgaggaggcccctgggcctctgcctccgccgccaaccccatcttctgaggatccaggcttttcttctcctctggggatgccagatcctcatctgtatcaccagatgggccttcttctcaaacacatgcaggatgtgagagtcctcctcggtcacctgctcatggagttgagggaattatctggccaccggaagcctgggaccacaaaggctactgctgaatagaagtaaacagttcatccatgatctcacttaaccaccccaataaatctgattctttattttctcttcctgtcctgcacatatgcataagtacttttacaagttgtcccagtgttttgttagaataatgtagttaggtgagtgtaaataaatttatataaagtgagaattagagtttagctataattgtgtattctctcttaacacaacagaattctgctgtctagatcaggaatttctatctgttatatcgaccagaatgttgtgatttaaagagaactaatggaagtggattgaatacagcagtctcaactgggggcaattttgccccccagaggacattgggcaatgtttggagacattttggtcattatacttggggggttgggggatggtgggatgtgtgtgctactggcatccagtaaatagaagccaggggtgccgctaaacatcctataatgcacagggcagtaccccacaacgaaaaataatctggcccaaaatgtcagttgtactgagtttgagaaaccccagcctaatgaaaccctaggtgttgggctctggaatgggactttgtcccttctaattattatctctttccagcctcattcagctattcttactgacataccagtctttagctggtgctatggtctgttctttagttctagtttgtatcccctcaaaagccattatgttgaaatcctaatccccaaggtgatggcattaagaagtgggcctttgggaagtgattagatcaggagtgcagagccctcatgattaggattagtgcccttatttaaaaaggccccagagagctaactcacccttccaccatatgaggacgtggcaagaagatgacatgtatgagaaccaaaaaacagctgtcgccaaacaccgactctgtcgttgccttgatcttgaacttccagcctccagaactatgagaaataaaattctgttgtttgt

SEQ ID NO: 10598 - protein, 359 aa, Homo sapiens
MKLGCVLMAWALYLSLGVLWVAQMLLAASFETLQCEGPVCTEESSCHTEDDLTDAREAGFQVKAYTFSEPFHLIVSYDWLILQGPAKPVFEGDLLVLRCQAWQDWPLTQVTFYRDGSALGPPGPNREFSITVVQKADSGHYHCSGIFQSPGPGIPETASVVAITVQELFPAPILRAVPSAEPQAGSPMTLSCQTKLPLQRSAARLLFSFYKDGRIVQSRGLSSEFQIPTASEDHSGSYWCEAATEDNQVWKQSPQLEIRVQGASSSAAPPTLNPAPQKSAAPGTAPEEAPGPLPPPPTPSSEDPGFSSPLGMPDPHLYHQMGLLLKHMQDVRVLLGHLLMELRELSGHRKPGTTKATAE

SEQ ID NO: 10599 - protein, 9 aa, Artificial Sequence
  Ly1464 MHC HLA A1 binding peptide
ATEDNQVWK

SEQ ID NO: 10600 - protein, 9 aa, Artificial Sequence
  Ly1464 MHC HLA A1 binding peptide
ASEDHSGSY

SEQ ID NO: 10601 - protein, 9 aa, Artificial Sequence
  Ly1464 MHC HLA A1 binding peptide
FSEPFHLIV

SEQ ID NO: 10602 - protein, 9 aa, Artificial Sequence
  Ly1464 MHC HLA A1 binding peptide
LTDAREAGF

SEQ ID NO: 10603 - protein, 9 aa, Artificial Sequence
  Ly1464 MHC HLA A1 binding peptide
SSEDPGFSS

SEQ ID NO: 10604 - protein, 9 aa, Artificial Sequence
  Ly1464 MHC HLA A1 binding peptide
ELFPAPILR

SEQ ID NO: 10605 - protein, 9 aa, Artificial Sequence
  Ly1464 MHC HLA A1 binding peptide
SSEFQIPTA

SEQ ID NO: 10606 - protein, 9 aa, Artificial Sequence
  Ly1464 MHC HLA A1 binding peptide
MPDPHLYHQ

SEQ ID NO: 10607 - protein, 9 aa, Artificial Sequence
  Ly1464 MHC HLA A1 binding peptide
LMELRELSG

SEQ ID NO: 10608 - protein, 9 aa, Artificial Sequence
  Ly1464 MHC HLA A1 binding peptide
HTEDDLTDA

SEQ ID NO: 10609 - protein, 9 aa, Artificial Sequence
  Ly1464 MHC HLA A1 binding peptide
CTEESSCHT

SEQ ID NO: 10610 - protein, 9 aa, Artificial Sequence
  Ly1464 MHC HLA A1 binding peptide
ALGPPGPNR

SEQ ID NO: 10611 - protein, 9 aa, Artificial Sequence
  Ly1464 MHC HLA A1 binding peptide
LGMPDPHLY

SEQ ID NO: 10612 - protein, 9 aa, Artificial Sequence
  Ly1464 MHC HLA A1 binding peptide
CVLMAWALY

SEQ ID NO: 10613 - protein, 9 aa, Artificial Sequence
  Ly1464 MHC HLA A1 binding peptide
KADSGHYHC

SEQ ID NO: 10614 - protein, 9 aa, Artificial Sequence
  Ly1464 MHC HLA A1 binding peptide
LRELSGHRK

SEQ ID NO: 10615 - protein, 9 aa, Artificial Sequence
  Ly1464 MHC HLA A1 binding peptide
QLEIRVQGA

SEQ ID NO: 10616 - protein, 9 aa, Artificial Sequence
  Ly1464 MHC HLA A1 binding peptide
WCEAATEDN

SEQ ID NO: 10617 - protein, 9 aa, Artificial Sequence
  Ly1464 MHC HLA A1 binding peptide
SAEPQAGSP

SEQ ID NO: 10618 - protein, 9 aa, Artificial Sequence
  Ly1464 MHC HLA A1 binding peptide
AREAGFQVK

SEQ ID NO: 10619 - protein, 9 aa, Artificial Sequence
  Ly1464 MHC HLA A2 binding peptide
YLSLGVLWV

SEQ ID NO: 10620 - protein, 9 aa, Artificial Sequence
  Ly1464 MHC HLA A2 binding peptide
LLLKHMQDV

SEQ ID NO: 10621 - protein, 9 aa, Artificial Sequence
  Ly1464 MHC HLA A2 binding peptide
VLMAWALYL

SEQ ID NO: 10622 - protein, 9 aa, Artificial Sequence
  Ly1464 MHC HLA A2 binding peptide
VLWVAQMLL

SEQ ID NO: 10623 - protein, 9 aa, Artificial Sequence
  Ly1464 MHC HLA A2 binding peptide
MLLAASFET

SEQ ID NO: 10624 - protein, 9 aa, Artificial Sequence
  Ly1464 MHC HLA A2 binding peptide
ILQGPAKPV

SEQ ID NO: 10625 - protein, 9 aa, Artificial Sequence
  Ly1464 MHC HLA A2 binding peptide
LLGHLLMEL

SEQ ID NO: 10626 - protein, 9 aa, Artificial Sequence
  Ly1464 MHC HLA A2 binding peptide
LLAASFETL

SEQ ID NO: 10627 - protein, 9 aa, Artificial Sequence
  Ly1464 MHC HLA A2 binding peptide
WQDWPLTQV

SEQ ID NO: 10628 - protein, 9 aa, Artificial Sequence
  Ly1464 MHC HLA A2 binding peptide
YTFSEPFHL

SEQ ID NO: 10629 - protein, 9 aa, Artificial Sequence
  Ly1464 MHC HLA A2 binding peptide
LIVSYDWLI

SEQ ID NO: 10630 - protein, 9 aa, Artificial Sequence
  Ly1464 MHC HLA A2 binding peptide
KLPLQRSAA

SEQ ID NO: 10631 - protein, 9 aa, Artificial Sequence
  Ly1464 MHC HLA A2 binding peptide
WALYLSLGV

SEQ ID NO: 10632 - protein, 9 aa, Artificial Sequence
  Ly1464 MHC HLA A2 binding peptide
CQAWQDWPL

SEQ ID NO: 10633 - protein, 9 aa, Artificial Sequence
  Ly1464 MHC HLA A2 binding peptide
GIPETASVV

SEQ ID NO: 10634 - protein, 9 aa, Artificial Sequence
  Ly1464 MHC HLA A2 binding peptide
QVWKQSPQL

SEQ ID NO: 10635 - protein, 9 aa, Artificial Sequence
  Ly1464 MHC HLA A2 binding peptide
ALYLSLGVL

SEQ ID NO: 10636 - protein, 9 aa, Artificial Sequence
  Ly1464 MHC HLA A2 binding peptide
QMGLLLKHM

SEQ ID NO: 10637 - protein, 9 aa, Artificial Sequence
  Ly1464 MHC HLA A2 binding peptide
VVAITVQEL

SEQ ID NO: 10638 - protein, 9 aa, Artificial Sequence
  Ly1464 MHC HLA A2 binding peptide
GVLWVAQML

SEQ ID NO: 10639 - protein, 9 aa, Artificial Sequence
  Ly1464 MHC HLA A3 binding peptide
WLILQGPAK

SEQ ID NO: 10640 - protein, 9 aa, Artificial Sequence
  Ly1464 MHC HLA A3 binding peptide
ELFPAPILR

SEQ ID NO: 10641 - protein, 9 aa, Artificial Sequence
  Ly1464 MHC HLA A3 binding peptide
ALGPPGPNR

SEQ ID NO: 10642 - protein, 9 aa, Artificial Sequence
  Ly1464 MHC HLA A3 binding peptide
VLWVAQMLL

SEQ ID NO: 10643 - protein, 9 aa, Artificial Sequence
  Ly1464 MHC HLA A3 binding peptide
VLMAWALYL

SEQ ID NO: 10644 - protein, 9 aa, Artificial Sequence
  Ly1464 MHC HLA A3 binding peptide
LLKHMQDVR

SEQ ID NO: 10645 - protein, 9 aa, Artificial Sequence
  Ly1464 MHC HLA A3 binding peptide
KLGCVLMAW

SEQ ID NO: 10646 - protein, 9 aa, Artificial Sequence
  Ly1464 MHC HLA A3 binding peptide
PMTLSCQTK

SEQ ID NO: 10647 - protein, 9 aa, Artificial Sequence
  Ly1464 MHC HLA A3 binding peptide
LLGHLLMEL

SEQ ID NO: 10648 - protein, 9 aa, Artificial Sequence
  Ly1464 MHC HLA A3 binding peptide
GMPDPHLYH

SEQ ID NO: 10649 - protein, 9 aa, Artificial Sequence
  Ly1464 MHC HLA A3 binding peptide
PLTQVTFYR

SEQ ID NO: 10650 - protein, 9 aa, Artificial Sequence
  Ly1464 MHC HLA A3 binding peptide
LLAASFETL

SEQ ID NO: 10651 - protein, 9 aa, Artificial Sequence
  Ly1464 MHC HLA A3 binding peptide
HLYHQMGLL

SEQ ID NO: 10652 - protein, 9 aa, Artificial Sequence
  Ly1464 MHC HLA A3 binding peptide
ALYLSLGVL

SEQ ID NO: 10653 - protein, 9 aa, Artificial Sequence
  Ly1464 MHC HLA A3 binding peptide
YLSLGVLWV

SEQ ID NO: 10654 - protein, 9 aa, Artificial Sequence
  Ly1464 MHC HLA A3 binding peptide
ATEDNQVWK

SEQ ID NO: 10655 - protein, 9 aa, Artificial Sequence
  Ly1464 MHC HLA A3 binding peptide
HMQDVRVLL

SEQ ID NO: 10656 - protein, 9 aa, Artificial Sequence
  Ly1464 MHC HLA A3 binding peptide
HLIVSYDWL

SEQ ID NO: 10657 - protein, 9 aa, Artificial Sequence
  Ly1464 MHC HLA A3 binding peptide
KAYTFSEPF

SEQ ID NO: 10658 - protein, 9 aa, Artificial Sequence
  Ly1464 MHC HLA A3 binding peptide
KQSPQLEIR

SEQ ID NO: 10659 - protein, 9 aa, Artificial Sequence
  Ly1464 MHC HLA A11 binding peptide
ATEDNQVWK

SEQ ID NO: 10660 - protein, 9 aa, Artificial Sequence
  Ly1464 MHC HLA A11 binding peptide
WLILQGPAK

SEQ ID NO: 10661 - protein, 9 aa, Artificial Sequence
  Ly1464 MHC HLA A11 binding peptide
KQSPQLEIR

SEQ ID NO: 10662 - protein, 9 aa, Artificial Sequence
  Ly1464 MHC HLA A11 binding peptide
CQTKLPLQR

SEQ ID NO: 10663 - protein, 9 aa, Artificial Sequence
  Ly1464 MHC HLA A11 binding peptide
RVLLGHLLM

SEQ ID NO: 10664 - protein, 9 aa, Artificial Sequence
  Ly1464 MHC HLA A11 binding peptide
PTLNPAPQK

SEQ ID NO: 10665 - protein, 9 aa, Artificial Sequence
  Ly1464 MHC HLA A11 binding peptide
ELFPAPILR

SEQ ID NO: 10666 - protein, 9 aa, Artificial Sequence
  Ly1464 MHC HLA A11 binding peptide
ARLLFSFYK

SEQ ID NO: 10667 - protein, 9 aa, Artificial Sequence
  Ly1464 MHC HLA A11 binding peptide
GVLWVAQML

SEQ ID NO: 10668 - protein, 9 aa, Artificial Sequence
  Ly1464 MHC HLA A11 binding peptide
LLKHMQDVR

SEQ ID NO: 10669 - protein, 9 aa, Artificial Sequence
  Ly1464 MHC HLA A11 binding peptide
ALGPPGPNR

SEQ ID NO: 10670 - protein, 9 aa, Artificial Sequence
  Ly1464 MHC HLA A11 binding peptide
GHRKPGTTK

SEQ ID NO: 10671 - protein, 9 aa, Artificial Sequence
  Ly1464 MHC HLA A11 binding peptide
RVQGASSSA

SEQ ID NO: 10672 - protein, 9 aa, Artificial Sequence
  Ly1464 MHC HLA A11 binding peptide
LPLQRSAAR

SEQ ID NO: 10673 - protein, 9 aa, Artificial Sequence
  Ly1464 MHC HLA A11 binding peptide
EFSITVVQK

SEQ ID NO: 10674 - protein, 9 aa, Artificial Sequence
  Ly1464 MHC HLA A11 binding peptide
YTFSEPFHL

SEQ ID NO: 10675 - protein, 9 aa, Artificial Sequence
  Ly1464 MHC HLA A11 binding peptide
ITVQELFPA

SEQ ID NO: 10676 - protein, 9 aa, Artificial Sequence
  Ly1464 MHC HLA A11 binding peptide
YHQMGLLLK

SEQ ID NO: 10677 - protein, 9 aa, Artificial Sequence
  Ly1464 MHC HLA A11 binding peptide
QVWKQSPQL

SEQ ID NO: 10678 - protein, 9 aa, Artificial Sequence
  Ly1464 MHC HLA A11 binding peptide
LFSFYKDGR

SEQ ID NO: 10679 - protein, 9 aa, Artificial Sequence
  Ly1464 MHC HLA A24 binding peptide
LYHQMGLLL

SEQ ID NO: 10680 - protein, 9 aa, Artificial Sequence
  Ly1464 MHC HLA A24 binding peptide
VFEGDLLVL

SEQ ID NO: 10681 - protein, 9 aa, Artificial Sequence
  Ly1464 MHC HLA A24 binding peptide
TFYRDGSAL

SEQ ID NO: 10682 - protein, 9 aa, Artificial Sequence
  Ly1464 MHC HLA A24 binding peptide
GFQVKAYTF

SEQ ID NO: 10683 - protein, 9 aa, Artificial Sequence
  Ly1464 MHC HLA A24 binding peptide
KPVFEGDLL

SEQ ID NO: 10684 - protein, 9 aa, Artificial Sequence
  Ly1464 MHC HLA A24 binding peptide
HMQDVRVLL

SEQ ID NO: 10685 - protein, 9 aa, Artificial Sequence
  Ly1464 MHC HLA A24 binding peptide
GVLWVAQML

SEQ ID NO: 10686 - protein, 9 aa, Artificial Sequence
  Ly1464 MHC HLA A24 binding peptide
LYLSLGVLW

SEQ ID NO: 10687 - protein, 9 aa, Artificial Sequence
  Ly1464 MHC HLA A24 binding peptide
IFQSPGPGI

SEQ ID NO: 10688 - protein, 9 aa, Artificial Sequence
  Ly1464 MHC HLA A24 binding peptide
APEEAPGPL

SEQ ID NO: 10689 - protein, 9 aa, Artificial Sequence
  Ly1464 MHC HLA A24 binding peptide
TFSEPFHLI

SEQ ID NO: 10690 - protein, 9 aa, Artificial Sequence
  Ly1464 MHC HLA A24 binding peptide
HLLMELREL

SEQ ID NO: 10691 - protein, 9 aa, Artificial Sequence
  Ly1464 MHC HLA A24 binding peptide
MTLSCQTKL

SEQ ID NO: 10692 - protein, 9 aa, Artificial Sequence
  Ly1464 MHC HLA A24 binding peptide
VLMAWALYL

SEQ ID NO: 10693 - protein, 9 aa, Artificial Sequence
  Ly1464 MHC HLA A24 binding peptide
HLIVSYDWL

SEQ ID NO: 10694 - protein, 9 aa, Artificial Sequence
  Ly1464 MHC HLA A24 binding peptide
GCVLMAWAL

SEQ ID NO: 10695 - protein, 9 aa, Artificial Sequence
  Ly1464 MHC HLA A24 binding peptide
LLGHLLMEL

SEQ ID NO: 10696 - protein, 9 aa, Artificial Sequence
  Ly1464 MHC HLA A24 binding peptide
VVAITVQEL

SEQ ID NO: 10697 - protein, 9 aa, Artificial Sequence
  Ly1464 MHC HLA A24 binding peptide
MAWALYLSL

SEQ ID NO: 10698 - protein, 9 aa, Artificial Sequence
  Ly1464 MHC HLA A24 binding peptide
DVRVLLGHL

SEQ ID NO: 10699 - protein, 9 aa, Artificial Sequence
  Ly1464 MHC HLA A68 binding peptide
ELFPAPILR

SEQ ID NO: 10700 - protein, 9 aa, Artificial Sequence
  Ly1464 MHC HLA A68 binding peptide
ATEDNQVWK

SEQ ID NO: 10701 - protein, 9 aa, Artificial Sequence
  Ly1464 MHC HLA A68 binding peptide
ELRELSGHR

SEQ ID NO: 10702 - protein, 9 aa, Artificial Sequence
  Ly1464 MHC HLA A68 binding peptide
DVRVLLGHL

SEQ ID NO: 10703 - protein, 9 aa, Artificial Sequence
  Ly1464 MHC HLA A68 binding peptide
ALGPPGPNR

SEQ ID NO: 10704 - protein, 9 aa, Artificial Sequence
  Ly1464 MHC HLA A68 binding peptide
LPLQRSAAR

SEQ ID NO: 10705 - protein, 9 aa, Artificial Sequence
  Ly1464 MHC HLA A68 binding peptide
ETLQCEGPV

SEQ ID NO: 10706 - protein, 9 aa, Artificial Sequence
  Ly1464 MHC HLA A68 binding peptide
RVLLGHLLM

SEQ ID NO: 10707 - protein, 9 aa, Artificial Sequence
  Ly1464 MHC HLA A68 binding peptide
VVAITVQEL

SEQ ID NO: 10708 - protein, 9 aa, Artificial Sequence
  Ly1464 MHC HLA A68 binding peptide
WVAQMLLAA

SEQ ID NO: 10709 - protein, 9 aa, Artificial Sequence
  Ly1464 MHC HLA A68 binding peptide
GVLWVAQML

SEQ ID NO: 10710 - protein, 9 aa, Artificial Sequence
  Ly1464 MHC HLA A68 binding peptide
KQSPQLEIR

SEQ ID NO: 10711 - protein, 9 aa, Artificial Sequence
  Ly1464 MHC HLA A68 binding peptide
PTLNPAPQK

SEQ ID NO: 10712 - protein, 9 aa, Artificial Sequence
  Ly1464 MHC HLA A68 binding peptide
AVPSAEPQA

SEQ ID NO: 10713 - protein, 9 aa, Artificial Sequence
  Ly1464 MHC HLA A68 binding peptide
ETASVVAIT

SEQ ID NO: 10714 - protein, 9 aa, Artificial Sequence
  Ly1464 MHC HLA A68 binding peptide
VVQKADSGH

SEQ ID NO: 10715 - protein, 9 aa, Artificial Sequence
  Ly1464 MHC HLA A68 binding peptide
WLILQGPAK

SEQ ID NO: 10716 - protein, 9 aa, Artificial Sequence
  Ly1464 MHC HLA A68 binding peptide
LLKHMQDVR

SEQ ID NO: 10717 - protein, 9 aa, Artificial Sequence
  Ly1464 MHC HLA A68 binding peptide
CQTKLPLQR

SEQ ID NO: 10718 - protein, 9 aa, Artificial Sequence
  Ly1464 MHC HLA A68 binding peptide
RVQGASSSA

SEQ ID NO: 10719 - protein, 9 aa, Artificial Sequence
  Ly1464 MHC HLA B7 binding peptide
DVRVLLGHL

SEQ ID NO: 10720 - protein, 9 aa, Artificial Sequence
  Ly1464 MHC HLA B7 binding peptide
KPVFEGDLL

SEQ ID NO: 10721 - protein, 9 aa, Artificial Sequence
  Ly1464 MHC HLA B7 binding peptide
APEEAPGPL

SEQ ID NO: 10722 - protein, 9 aa, Artificial Sequence
  Ly1464 MHC HLA B7 binding peptide
LQRSAARLL

SEQ ID NO: 10723 - protein, 9 aa, Artificial Sequence
  Ly1464 MHC HLA B7 binding peptide
QVWKQSPQL

SEQ ID NO: 10724 - protein, 9 aa, Artificial Sequence
  Ly1464 MHC HLA B7 binding peptide
VVAITVQEL

SEQ ID NO: 10725 - protein, 9 aa, Artificial Sequence
  Ly1464 MHC HLA B7 binding peptide
IVSYDWLIL

SEQ ID NO: 10726 - protein, 9 aa, Artificial Sequence
  Ly1464 MHC HLA B7 binding peptide
GVLWVAQML

SEQ ID NO: 10727 - protein, 9 aa, Artificial Sequence
  Ly1464 MHC HLA B7 binding peptide
VLMAWALYL

SEQ ID NO: 10728 - protein, 9 aa, Artificial Sequence
  Ly1464 MHC HLA B7 binding peptide
MAWALYLSL

SEQ ID NO: 10729 - protein, 9 aa, Artificial Sequence
  Ly1464 MHC HLA B7 binding peptide
ALYLSLGVL

SEQ ID NO: 10730 - protein, 9 aa, Artificial Sequence
  Ly1464 MHC HLA B7 binding peptide
HMQDVRVLL

SEQ ID NO: 10731 - protein, 9 aa, Artificial Sequence
  Ly1464 MHC HLA B7 binding peptide
APGTAPEEA

SEQ ID NO: 10732 - protein, 9 aa, Artificial Sequence
  Ly1464 MHC HLA B7 binding peptide
SPMTLSCQT

SEQ ID NO: 10733 - protein, 9 aa, Artificial Sequence
  Ly1464 MHC HLA B7 binding peptide
DAREAGFQV

SEQ ID NO: 10734 - protein, 9 aa, Artificial Sequence
  Ly1464 MHC HLA B7 binding peptide
RVLLGHLLM

SEQ ID NO: 10735 - protein, 9 aa, Artificial Sequence
  Ly1464 MHC HLA B7 binding peptide
HLLMELREL

SEQ ID NO: 10736 - protein, 9 aa, Artificial Sequence
  Ly1464 MHC HLA B7 binding peptide
LLGHLLMEL

SEQ ID NO: 10737 - protein, 9 aa, Artificial Sequence
  Ly1464 MHC HLA B7 binding peptide
VLWVAQMLL

SEQ ID NO: 10738 - protein, 9 aa, Artificial Sequence
  Ly1464 MHC HLA B7 binding peptide
HLYHQMGLL

SEQ ID NO: 10739 - protein, 9 aa, Artificial Sequence
  Ly1464 MHC HLA B8 binding peptide
DVRVLLGHL

SEQ ID NO: 10740 - protein, 9 aa, Artificial Sequence
  Ly1464 MHC HLA B8 binding peptide
DAREAGFQV

SEQ ID NO: 10741 - protein, 9 aa, Artificial Sequence
  Ly1464 MHC HLA B8 binding peptide
LQRSAARLL

SEQ ID NO: 10742 - protein, 9 aa, Artificial Sequence
  Ly1464 MHC HLA B8 binding peptide
FSFYKDGRI

SEQ ID NO: 10743 - protein, 9 aa, Artificial Sequence
  Ly1464 MHC HLA B8 binding peptide
GCVLMAWAL

SEQ ID NO: 10744 - protein, 9 aa, Artificial Sequence
  Ly1464 MHC HLA B8 binding peptide
MAWALYLSL

SEQ ID NO: 10745 - protein, 9 aa, Artificial Sequence
  Ly1464 MHC HLA B8 binding peptide
LLGHLLMEL

SEQ ID NO: 10746 - protein, 9 aa, Artificial Sequence
  Ly1464 MHC HLA B8 binding peptide
HLYHQMGLL

SEQ ID NO: 10747 - protein, 9 aa, Artificial Sequence
  Ly1464 MHC HLA B8 binding peptide
VLMAWALYL

SEQ ID NO: 10748 - protein, 9 aa, Artificial Sequence
  Ly1464 MHC HLA B8 binding peptide
AARLLFSFY

SEQ ID NO: 10749 - protein, 9 aa, Artificial Sequence
  Ly1464 MHC HLA B8 binding peptide
APILRAVPS

SEQ ID NO: 10750 - protein, 9 aa, Artificial Sequence
  Ly1464 MHC HLA B8 binding peptide
ALYLSLGVL

SEQ ID NO: 10751 - protein, 9 aa, Artificial Sequence
  Ly1464 MHC HLA B8 binding peptide
HLIVSYDWL

SEQ ID NO: 10752 - protein, 9 aa, Artificial Sequence
  Ly1464 MHC HLA B8 binding peptide
LLAASFETL

SEQ ID NO: 10753 - protein, 9 aa, Artificial Sequence
  Ly1464 MHC HLA B8 binding peptide
VLWVAQMLL

SEQ ID NO: 10754 - protein, 9 aa, Artificial Sequence
  Ly1464 MHC HLA B8 binding peptide
HMQDVRVLL

SEQ ID NO: 10755 - protein, 9 aa, Artificial Sequence
  Ly1464 MHC HLA B8 binding peptide
APEEAPGPL

SEQ ID NO: 10756 - protein, 9 aa, Artificial Sequence
  Ly1464 MHC HLA B8 binding peptide
LSGHRKPGT

SEQ ID NO: 10757 - protein, 9 aa, Artificial Sequence
  Ly1464 MHC HLA B8 binding peptide
GVLWVAQML

SEQ ID NO: 10758 - protein, 9 aa, Artificial Sequence
  Ly1464 MHC HLA B8 binding peptide
SSSAAPPTL

SEQ ID NO: 10759 - protein, 9 aa, Artificial Sequence
  Ly1464 MHC HLA B27 binding peptide
LRELSGHRK

SEQ ID NO: 10760 - protein, 9 aa, Artificial Sequence
  Ly1464 MHC HLA B27 binding peptide
VRVLLGHLL

SEQ ID NO: 10761 - protein, 9 aa, Artificial Sequence
  Ly1464 MHC HLA B27 binding peptide
ARLLFSFYK

SEQ ID NO: 10762 - protein, 9 aa, Artificial Sequence
  Ly1464 MHC HLA B27 binding peptide
AREAGFQVK

SEQ ID NO: 10763 - protein, 9 aa, Artificial Sequence
  Ly1464 MHC HLA B27 binding peptide
QRSAARLLF

SEQ ID NO: 10764 - protein, 9 aa, Artificial Sequence
  Ly1464 MHC HLA B27 binding peptide
GRIVQSRGL

SEQ ID NO: 10765 - protein, 9 aa, Artificial Sequence
  Ly1464 MHC HLA B27 binding peptide
NREFSITVV

SEQ ID NO: 10766 - protein, 9 aa, Artificial Sequence
  Ly1464 MHC HLA B27 binding peptide
KQSPQLEIR

SEQ ID NO: 10767 - protein, 9 aa, Artificial Sequence
  Ly1464 MHC HLA B27 binding peptide
HRKPGTTKA

SEQ ID NO: 10768 - protein, 9 aa, Artificial Sequence
  Ly1464 MHC HLA B27 binding peptide
IRVQGASSS

SEQ ID NO: 10769 - protein, 9 aa, Artificial Sequence
  Ly1464 MHC HLA B27 binding peptide
CQAWQDWPL

SEQ ID NO: 10770 - protein, 9 aa, Artificial Sequence
  Ly1464 MHC HLA B27 binding peptide
LRCQAWQDW

SEQ ID NO: 10771 - protein, 9 aa, Artificial Sequence
  Ly1464 MHC HLA B27 binding peptide
HLYHQMGLL

SEQ ID NO: 10772 - protein, 9 aa, Artificial Sequence
  Ly1464 MHC HLA B27 binding peptide
ALYLSLGVL

SEQ ID NO: 10773 - protein, 9 aa, Artificial Sequence
  Ly1464 MHC HLA B27 binding peptide
VLWVAQMLL

SEQ ID NO: 10774 - protein, 9 aa, Artificial Sequence
  Ly1464 MHC HLA B27 binding peptide
CQTKLPLQR

SEQ ID NO: 10775 - protein, 9 aa, Artificial Sequence
  Ly1464 MHC HLA B27 binding peptide
VQKADSGHY

SEQ ID NO: 10776 - protein, 9 aa, Artificial Sequence
  Ly1464 MHC HLA B27 binding peptide
LQGPAKPVF

SEQ ID NO: 10777 - protein, 9 aa, Artificial Sequence
  Ly1464 MHC HLA B27 binding peptide
AQMLLAASF

SEQ ID NO: 10778 - protein, 9 aa, Artificial Sequence
  Ly1464 MHC HLA B27 binding peptide
KAYTFSEPF

SEQ ID NO: 10779 - protein, 9 aa, Artificial Sequence
  Ly1464 MHC HLA B35 binding peptide
KPVFEGDLL

SEQ ID NO: 10780 - protein, 9 aa, Artificial Sequence
  Ly1464 MHC HLA B35 binding peptide
WPLTQVTFY

SEQ ID NO: 10781 - protein, 9 aa, Artificial Sequence
  Ly1464 MHC HLA B35 binding peptide
EPFHLIVSY

SEQ ID NO: 10782 - protein, 9 aa, Artificial Sequence
  Ly1464 MHC HLA B35 binding peptide
TPSSEDPGF

SEQ ID NO: 10783 - protein, 9 aa, Artificial Sequence
  Ly1464 MHC HLA B35 binding peptide
GPPGPNREF

SEQ ID NO: 10784 - protein, 9 aa, Artificial Sequence
  Ly1464 MHC HLA B35 binding peptide
AARLLFSFY

SEQ ID NO: 10785 - protein, 9 aa, Artificial Sequence
  Ly1464 MHC HLA B35 binding peptide
QSRGLSSEF

SEQ ID NO: 10786 - protein, 9 aa, Artificial Sequence
  Ly1464 MHC HLA B35 binding peptide
APEEAPGPL

SEQ ID NO: 10787 - protein, 9 aa, Artificial Sequence
  Ly1464 MHC HLA B35 binding peptide
VQKADSGHY

SEQ ID NO: 10788 - protein, 9 aa, Artificial Sequence
  Ly1464 MHC HLA B35 binding peptide
ASEDHSGSY

SEQ ID NO: 10789 - protein, 9 aa, Artificial Sequence
  Ly1464 MHC HLA B35 binding peptide
KAYTFSEPF

SEQ ID NO: 10790 - protein, 9 aa, Artificial Sequence
  Ly1464 MHC HLA B35 binding peptide
EAGFQVKAY

SEQ ID NO: 10791 - protein, 9 aa, Artificial Sequence
  Ly1464 MHC HLA B35 binding peptide
SSSAAPPTL

SEQ ID NO: 10792 - protein, 9 aa, Artificial Sequence
  Ly1464 MHC HLA B35 binding peptide
LSCQTKLPL

SEQ ID NO: 10793 - protein, 9 aa, Artificial Sequence
  Ly1464 MHC HLA B35 binding peptide
SSCHTEDDL

SEQ ID NO: 10794 - protein, 9 aa, Artificial Sequence
  Ly1464 MHC HLA B35 binding peptide
AATEDNQVW

SEQ ID NO: 10795 - protein, 9 aa, Artificial Sequence
  Ly1464 MHC HLA B35 binding peptide
KPGTTKATA

SEQ ID NO: 10796 - protein, 9 aa, Artificial Sequence
  Ly1464 MHC HLA B35 binding peptide
RVLLGHLLM

SEQ ID NO: 10797 - protein, 9 aa, Artificial Sequence
  Ly1464 MHC HLA B35 binding peptide
FPAPILRAV

SEQ ID NO: 10798 - protein, 9 aa, Artificial Sequence
  Ly1464 MHC HLA B35 binding peptide
DAREAGFQV

SEQ ID NO: 10799 - protein, 9 aa, Artificial Sequence
  Ly1464 MHC HLA B44 binding peptide
LEIRVQGAS

SEQ ID NO: 10800 - protein, 9 aa, Artificial Sequence
  Ly1464 MHC HLA B44 binding peptide
WPLTQVTFY

SEQ ID NO: 10801 - protein, 9 aa, Artificial Sequence
  Ly1464 MHC HLA B44 binding peptide
SEDHSGSYW

SEQ ID NO: 10802 - protein, 9 aa, Artificial Sequence
  Ly1464 MHC HLA B44 binding peptide
REAGFQVKA

SEQ ID NO: 10803 - protein, 9 aa, Artificial Sequence
  Ly1464 MHC HLA B44 binding peptide
EAGFQVKAY

SEQ ID NO: 10804 - protein, 9 aa, Artificial Sequence
  Ly1464 MHC HLA B44 binding peptide
LGMPDPHLY

SEQ ID NO: 10805 - protein, 9 aa, Artificial Sequence
  Ly1464 MHC HLA B44 binding peptide
SEFQIPTAS

SEQ ID NO: 10806 - protein, 9 aa, Artificial Sequence
  Ly1464 MHC HLA B44 binding peptide
AEPQAGSPM

SEQ ID NO: 10807 - protein, 9 aa, Artificial Sequence
  Ly1464 MHC HLA B44 binding peptide
QELFPAPIL

SEQ ID NO: 10808 - protein, 9 aa, Artificial Sequence
  Ly1464 MHC HLA B44 binding peptide
SEPFHLIVS

SEQ ID NO: 10809 - protein, 9 aa, Artificial Sequence
  Ly1464 MHC HLA B44 binding peptide
SAARLLFSF

SEQ ID NO: 10810 - protein, 9 aa, Artificial Sequence
  Ly1464 MHC HLA B44 binding peptide
VAITVQELF

SEQ ID NO: 10811 - protein, 9 aa, Artificial Sequence
  Ly1464 MHC HLA B44 binding peptide
ASEDHSGSY

SEQ ID NO: 10812 - protein, 9 aa, Artificial Sequence
  Ly1464 MHC HLA B44 binding peptide
AARLLFSFY

SEQ ID NO: 10813 - protein, 9 aa, Artificial Sequence
  Ly1464 MHC HLA B44 binding peptide
DDLTDAREA

SEQ ID NO: 10814 - protein, 9 aa, Artificial Sequence
  Ly1464 MHC HLA B44 binding peptide
FSITVVQKA

SEQ ID NO: 10815 - protein, 9 aa, Artificial Sequence
  Ly1464 MHC HLA B44 binding peptide
EPFHLIVSY

SEQ ID NO: 10816 - protein, 9 aa, Artificial Sequence
  Ly1464 MHC HLA B44 binding peptide
AQMLLAASF

SEQ ID NO: 10817 - protein, 9 aa, Artificial Sequence
  Ly1464 MHC HLA B44 binding peptide
TEDNQVWKQ

SEQ ID NO: 10818 - protein, 9 aa, Artificial Sequence
  Ly1464 MHC HLA B44 binding peptide
CEGPVCTEE

SEQ ID NO: 10819 - skipped

SEQ ID NO: 10820 - protein, 30 aa, Artificial Sequence
  Ly1464 immunogenic peptide
MKLGCVLMAWALYLSLGVLWVAQMLLAASF

SEQ ID NO: 10821 - protein, 30 aa, Artificial Sequence
  Ly1464 immunogenic peptide
LGVLWVAQMLLAASFETLQCEGPVCTEESS

SEQ ID NO: 10822 - protein, 30 aa, Artificial Sequence
  Ly1464 immunogenic peptide
ETLQCEGPVCTEESSCHTEDDLTDAREAGF

SEQ ID NO: 10823 - protein, 30 aa, Artificial Sequence
  Ly1464 immunogenic peptide
CHTEDDLTDAREAGFQVKAYTFSEPFHLIV

SEQ ID NO: 10824 - protein, 30 aa, Artificial Sequence
  Ly1464 immunogenic peptide
QVKAYTFSEPFHLIVSYDWLILQGPAKPVF

SEQ ID NO: 10825 - protein, 30 aa, Artificial Sequence
  Ly1464 immunogenic peptide
SYDWLILQGPAKPVFEGDLLVLRCQAWQDW

SEQ ID NO: 10826 - protein, 30 aa, Artificial Sequence
  Ly1464 immunogenic peptide
EGDLLVLRCQAWQDWPLTQVTFYRDGSALG

SEQ ID NO: 10827 - protein, 30 aa, Artificial Sequence
  Ly1464 immunogenic peptide
PLTQVTFYRDGSALGPPGPNREFSITVVQK

SEQ ID NO: 10828 - protein, 30 aa, Artificial Sequence
  Ly1464 immunogenic peptide
PPGPNREFSITVVQKADSGHYHCSGIFQSP

SEQ ID NO: 10829 - protein, 30 aa, Artificial Sequence
  Ly1464 immunogenic peptide
ADSGHYHCSGIFQSPGPGIPETASVVAITV

SEQ ID NO: 10830 - protein, 30 aa, Artificial Sequence
  Ly1464 immunogenic peptide
GPGIPETASVVAITVQELFPAPILRAVPSA

SEQ ID NO: 10831 - protein, 30 aa, Artificial Sequence
  Ly1464 immunogenic peptide
QELFPAPILRAVPSAEPQAGSPMTLSCQTK

SEQ ID NO: 10832 - protein, 30 aa, Artificial Sequence
  Ly1464 immunogenic peptide
EPQAGSPMTLSCQTKLPLQRSAARLLFSFY

SEQ ID NO: 10833 - protein, 30 aa, Artificial Sequence
  Ly1464 immunogenic peptide
LPLQRSAARLLFSFYKDGRIVQSRGLSSEF

SEQ ID NO: 10834 - protein, 30 aa, Artificial Sequence
  Ly1464 immunogenic peptide
KDGRIVQSRGLSSEFQIPTASEDHSGSYWC

SEQ ID NO: 10835 - protein, 30 aa, Artificial Sequence
  Ly1464 immunogenic peptide
QIPTASEDHSGSYWCEAATEDNQVWKQSPQ

SEQ ID NO: 10836 - protein, 30 aa, Artificial Sequence
  Ly1464 immunogenic peptide
EAATEDNQVWKQSPQLEIRVQGASSSAAPP

SEQ ID NO: 10837 - protein, 30 aa, Artificial Sequence
  Ly1464 immunogenic peptide
LEIRVQGASSSAAPPTLNPAPQKSAAPGTA

SEQ ID NO: 10838 - protein, 30 aa, Artificial Sequence
  Ly1464 immunogenic peptide
TLNPAPQKSAAPGTAPEEAPGPLPPPPTPS

SEQ ID NO: 10839 - protein, 30 aa, Artificial Sequence
  Ly1464 immunogenic peptide
PEEAPGPLPPPPTPSSEDPGFSSPLGMPDP

SEQ ID NO: 10840 - protein, 30 aa, Artificial Sequence
  Ly1464 immunogenic peptide
SEDPGFSSPLGMPDPHLYHQMGLLLKHMQD

SEQ ID NO: 10841 - protein, 30 aa, Artificial Sequence
  Ly1464 immunogenic peptide
HLYHQMGLLLKHMQDVRVLLGHLLMELREL

SEQ ID NO: 10842 - protein, 29 aa, Artificial Sequence
  Ly1464 immunogenic peptide
VRVLLGHLLMELRELSGHRKPGTTKATAE

SEQ ID NO: 10843 - DNA, 32 bp, Artificial Sequence
  Ly1464-sense cloning primer
cgtccatggacatgaagctgggctgtgtcctc

SEQ ID NO: 10844 - DNA, 35 bp, Artificial Sequence
  Ly1464-antisense cloning primer
ccttctcgagctattcagcagtagcctttgtggtc

SEQ ID NO: 10845 - DNA, 1080 bp, Homo sapiens
atgaagctgggctgtgtcctcatggcctgggccctctacctttcccttggtgtgctctgggtggcccagatgctactggctgccagttttgagacgctgcagtgtgagggacctgtctgcactgaggagagcagctgccacacggaggatgacttgactgatgcaagggaagctggcttccaggtcaaggcctacactttcagtgaacccttccacctgattgtgtcctatgactggctgatcctccaaggtccagccaagccagtttttgaaggggacctgctggttctgcgctgccaggcctggcaagactggccactgactcaggtgaccttctaccgagatggctcagctctgggtccccccgggcctaacagggaattctccatcaccgtggtacaaaaggcagacagcgggcactaccactgcagtggcatcttccagagccctggtcctgggatcccagaaacagcatctgttgtggctatcacagtccaagaactgtttccagcgccaattctcagagctgtaccctcagctgaaccccaagcaggaagccccatgaccctgagttgtcagacaaagttgcccctgcagaggtcagctgcccgcctcctcttctccttctacaaggatggaaggatagtgcaaagcagggggctctcctcagaattccagatccccacagcttcagaagatcactccgggtcatactggtgtgaggcagccactgaggacaaccaagtttggaaacagagcccccagctagagatcagagtgcagggtgcttccagctctgctgcacctcccacattgaatccagctcctcagaaatcagctgctccaggaactgctcctgaggaggcccctgggcctctgcctccgccgccaaccccatcttctgaggatccaggcttttcttctcctctggggatgccagatcctcatctgtatcaccagatgggccttcttctcaaacacatgcaggatgtgagagtcctcctcggtcacctgctcatggagttgagggaattatctggccaccggaagcctgggaccacaaaggctactgctgaatag

SEQ ID NO: 10846 - DNA, 4191 bp, Homo sapiens
agcgagacttccagtccgaggtcctgctttctgctatggaactattccacatgacaagtggaggtgatgcagcgatgttcagagacggcaaagagcctcagccaagtgcagaagctgctgctgccccttctcttgccaacatctcctgcttcacccagaagctggtggagaagctgtacagtgggatgttctcggcagaccccaggcatatcctcctcttcatcctggagcacatcatggtggtcattgagactgcctcttctcaaagggacactgtcctcagcactttatacagcagtttaaataaagtcattctttattgcctatccaagccccagcagtccctctccgaatgcctcggccttctcagcatcctgggctttctgcaggagcactgggatgttgtctttgccacctacaattccaacatcagcttcctcctgtgtctcatgcattgccttttgctactcaatgagagaagttacccagaaggatttggattggagcccaagcctagaatgtctacttatcatcaagtcttcctttccccaaatgaagacgtgaaagaaaaaagagaagacttaccaagtttgagtgatgtccaacacaacatccagaagacagtgcagactctctggcagcagctggtggcacaaaggcagcagaccctggaggatgccttcaagatcgatctctctgtgaaacctggagagagggaagtgaagattgaagaggtcacaccgctctgggaggagacgatgctcaaggcctggcagcattacttagcatctgagaagaagtcactggcaagtcgttcaaatgttgcacaccacagcaaagtcactttgtggagtggaagcctgtcctcagccatgaagctgatgcccgggcggcaggccaaggaccctgagtgcaagacagaggattttgtgtcatgtatagagaactacagaagaagaggacaagagctatatgcatctttatacaaagaccatgtgcaaaggcgaaaatgtggcaacatcaaggcagccaacgcctgggccaggatccaggagcagctttttggggagctgggcttgtggagccagggggaagaaaccaagccctgttccccatgggaactcgactggagagaaggaccagctcgaatgaggaaacgcatcaaacgcttgtctcctttggaggccctgagctcaggaaggcacaaggaaagccaagacaaaaatgatcatatttctcaaacaaatgctgaaaaccaagatgaactgacactgagggaggctgagggcgagccggacgaggtgggggtggactgcacccagctgaccttcttcccagccttacacgaaagtctgcactcagaagacttcttggaactgtgtcgggaaagacaagttattttacaagagcttcttgataaagaaaaggtgacgcagaagttctccctggtgattgtgcagggccacctggtgtcagaaggggtcctgctttttggccaccaacacttctacatctgcgagaacttcacactgtctcccacgggtgatgtctactgtacccgtcactgcttatccaacatcagcgatccgttcattttcaacctgtgcagcaaagacaggtccactgaccattactcgtgccagtgccacagctacgctgacatgcgggagctacggcaggctcgcttcctcctgcaggacatcgccctggagatcttcttccacaatggatattccaagtttcttgtcttctacaacaatgatcggagtaaggcctttaaaagcttctgctctttccaacccagcctgaaggggaaagccacctcggaggacaccctcaatctaaggagataccccggctctgacaggatcatgctgcagaagtggcagaaaagggacatcagcaattttgagtatctcatgtacctcaacaccgcggctgggagaacctgcaatgactacatgcagtacccagtgttcccctgggtcctcgcagactacacctcagagacattgaacttggcaaatccgaagattttccgggatctttcaaagcccatgggggctcagaccaaggaaaggaagctgaaatttatccagaggtttaaagaagttgagaaaactgaaggagacatgactgtccagtgccactactacacccactactcctcggccatcatcgtggcctcctacctggtccggatgccacccttcacccaggccttctgcgctctgcagggcggaagcttcgacgtggcagacagaatgttccacagtgtgaagagcacgtgggagtcggcctccagagagaacatgagtgacgtcagggagctgaccccagagttcttctacctgcctgagttcttaaccaactgcaacggggtagagttcggctgcatgcaggacgggactgtgctaggagacgtgcagctccctccctgggctgatggggaccctcggaaattcatcagcctgcacagaaaggccctggaaagtgactttgtcagtgccaacctccaccattggatagaccttatttttgggtacaagcagcaggggccagccgcagtggatgctgttaatatcttccacccctacttctacggtgacagaatggacctcagcagcatcactgaccccctcatcaaaagcaccatcctggggtttgtcagcaactttggacaggtgcccaaacagctctttaccaaacctcacccagccaggactgcagcagggaagcctctgcctggaaaggatgtctccacccccgtgagcctgcctggccacccacagccctttttctacagcctgcagtcgctgaggccctcccaggtcacggtcaaagatatgtacctcttttctctaggctcagagtcccccaaaggggccattggccacattgtctctactgagaagaccattctggctgtagagaggaacaaagtgctgctgcctcctctctggaacaggaccttcagctggggctttgatgacttcagctgctgcttggggagctacggctccgacaaggtcctgatgacattcgagaacctggctgcctggggccgctgtctgtgcgccgtgtgcccatccccaacaacgattgtcacctctgggaccagcactgtggtgtgtgtgtgggagctcagcatgaccaaaggccgcccgaggggcttgcgcctccggcaggccttgtatggacacacacaggctgtcacgtgcctggcagcgtcagtcaccttcagcctcctggtgagcggctcccaggactgcacctgtatcctgtgggatctggaccacctcacccacgtgacccgcctgcccgcccatcgggaaggcatctcagccatcaccatcagtgacgtctcaggcaccattgtctcctgtgcgggagcacacttgtccctgtggaatgtcaatggacagcccctggccagcatcaccacagcctggggcccagaaggagccataacctgttgctgcctgatggagggcccagcatgggacacaagccagatcatcatcaccgggagtcaagacggcatggtccgggtttggaagactgaggatgtgaagatgtctgttcctggacggccagcaggagaggagcccctggctcagcctccaagcccaagaggccacaagtgggagaagaacctggccttgagtcgagagctggacgttagcattgctttgacagggaagcccagcaaaaccagccccgcagtgactgctctggccgtgtccagaaaccacaccaaactcctggttggtgatgagagggggagaatattctgctggtctgcagatgggtaggaagagagaggcagcagaggctctggcacaacagtgccaggctgagggtggcagaggtgactggggcctgagctctgcctacagaagaaacccccagggcctccttccccacagttctcaaggaagggcctctggcaatcacagctctgcagcccaaccctctccatggccgatgggacttctatgaaaaggatgagcacacacactcggagggctgagcagcacgctggaaactgtgacttggtgatgcccagctgcacacgaaattacacatgactcaccttattaagggctattgcactgaaaaaaaaaaaaagatgggtcgcttactggaaattattgtattgtctttattttattaaagcaactatgtttt

SEQ ID NO: 10847 - protein, 1270 aa, Homo sapiens
RDFQSEVLLSAMELFHMTSGGDAAMFRDGKEPQPSAEAAAAPSLANISCFTQKLVEKLYSGMFSADPRHILLFILEHIMVVIETASSQRDTVLSTLYSSLNKVILYCLSKPQQSLSECLGLLSILGFLQEHWDVVFATYNSNISFLLCLMHCLLLLNERSYPEGFGLEPKPRMSTYHQVFLSPNEDVKEKREDLPSLSDVQHNIQKTVQTLWQQLVAQRQQTLEDAFKIDLSVKPGEREVKIEEVTPLWEETMLKAWQHYLASEKKSLASRSNVAHHSKVTLWSGSLSSAMKLMPGRQAKDPECKTEDFVSCIENYRRRGQELYASLYKDHVQRRKCGNIKAANAWARIQEQLFGELGLWSQGEETKPCSPWELDWREGPARMRKRIKRLSPLEALSSGRHKESQDKNDHISQTNAENQDELTLREAEGEPDEVGVDCTQLTFFPALHESLHSEDFLELCRERQVILQELLDKEKVTQKFSLVIVQGHLVSEGVLLFGHQHFYICENFTLSPTGDVYCTRHCLSNISDPFIFNLCSKDRSTDHYSCQCHSYADMRELRQARFLLQDIALEIFFHNGYSKFLVFYNNDRSKAFKSFCSFQPSLKGKATSEDTLNLRRYPGSDRIMLQKWQKRDISNFEYLMYLNTAAGRTCNDYMQYPVFPWVLADYTSETLNLANPKIFRDLSKPMGAQTKERKLKFIQRFKEVEKTEGDMTVQCHYYTHYSSAIIVASYLVRMPPFTQAFCALQGGSFDVADRMFHSVKSTWESASRENMSDVRELTPEFFYLPEFLTNCNGVEFGCMQDGTVLGDVQLPPWADGDPRKFISLHRKALESDFVSANLHHWIDLIFGYKQQGPAAVDAVNIFHPYFYGDRMDLSSITDPLIKSTILGFVSNFGQVPKQLFTKPHPARTAAGKPLPGKDVSTPVSLPGHPQPFFYSLQSLRPSQVTVKDMYLFSLGSESPKGAIGHIVSTEKTILAVERNKVLLPPLWNRTFSWGFDDFSCCLGSYGSDKVLMTFENLAAWGRCLCAVCPSPTTIVTSGTSTVVCVWELSMTKGRPRGLRLRQALYGHTQAVTCLAASVTFSLLVSGSQDCTCILWDLDHLTHVTRLPAHREGISAITISDVSGTIVSCAGAHLSLWNVNGQPLASITTAWGPEGAITCCCLMEGPAWDTSQIIITGSQDGMVRVWKTEDVKMSVPGRPAGEEPLAQPPSPRGHKWEKNLALSRELDVSIALTGKPSKTSPAVTALAVSRNHTKLLVGDERGRIFCWSADG

SEQ ID NO: 10848 - protein, 647 aa, Homo sapiens
MLQKWQKRDISNFEYLMYLNTAAGRTCNDYMQYPVFPWVLADYTSETLNLANPKIFRDLSKPMGAQTKERKLKFIQRFKEVEKTEGDMTVQCHYYTHYSSAIIVASYLVRMPPFTQAFCALQGGSFDVADRMFHSVKSTWESASRENMSDVRELTPEFFYLPEFLTNCNGVEFGCMQDGTVLGDVQLPPWADGDPRKFISLHRKALESDFVSANLHHWIDLIFGYKQQGPAAVDAVNIFHPYFYGDRMDLSSITDPLIKSTILGFVSNFGQVPKQLFTKPHPARTAAGKPLPGKDVSTPVSLPGHPQPFFYSLQSLRPSQVTVKDMYLFSLGSESPKGAIGHIVSTEKTILAVERNKVLLPPLWNRTFSWGFDDFSCCLGSYGSDKVLMTFENLAAWGRCLCAVCPSPTTIVTSGTSTVVCVWELSMTKGRPRGLRLRQALYGHTQAVTCLAASVTFSLLVSGSQDCTCILWDLDHLTHVTRLPAHREGISAITISDVSGTIVSCAGAHLSLWNVNGQPLASITTAWGPEGAITCCCLMEGPAWDTSQIIITGSQDGMVRVWKTEDVKMSVPGRPAGEEPLAQPPSPRGHKWEKNLALSRELDVSIALTGKPSKTSPAVTALAVSRNHTKLLVGDERGRIFCWSADG

SEQ ID NO: 10849 - protein, 9 aa, Artificial Sequence
  Ly1484 long MHC HLA A2 class I binding peptide
FLLCLMHCL

SEQ ID NO: 10850 - protein, 9 aa, Artificial Sequence
  Ly1484 long MHC HLA A2 class I binding peptide
YLPEFLTNC

SEQ ID NO: 10851 - protein, 9 aa, Artificial Sequence
  Ly1484 long MHC HLA A2 class I binding peptide
KLYSGMFSA

SEQ ID NO: 10852 - protein, 9 aa, Artificial Sequence
  Ly1484 long MHC HLA A2 class I binding peptide
FILEHIMVV

SEQ ID NO: 10853 - protein, 9 aa, Artificial Sequence
  Ly1484 long MHC HLA A2 class I binding peptide
TLYSSLNKV

SEQ ID NO: 10854 - protein, 9 aa, Artificial Sequence
  Ly1484 long MHC HLA A2 class I binding peptide
FLQEHWDVV

SEQ ID NO: 10855 - protein, 9 aa, Artificial Sequence
  Ly1484 long MHC HLA A2 class I binding peptide
ILWDLDHLT

SEQ ID NO: 10856 - protein, 9 aa, Artificial Sequence
  Ly1484 long MHC HLA A2 class I binding peptide
ALQGGSFDV

SEQ ID NO: 10857 - protein, 9 aa, Artificial Sequence
  Ly1484 long MHC HLA A2 class I binding peptide
MQYPVFPWV

SEQ ID NO: 10858 - protein, 9 aa, Artificial Sequence
  Ly1484 long MHC HLA A2 class I binding peptide
ALYGHTQAV

SEQ ID NO: 10859 - protein, 9 aa, Artificial Sequence
  Ly1484 long MHC HLA A2 class I binding peptide
YLVRMPPFT

SEQ ID NO: 10860 - protein, 9 aa, Artificial Sequence
  Ly1484 long MHC HLA A2 class I binding peptide
CLMHCLLLL

SEQ ID NO: 10861 - protein, 9 aa, Artificial Sequence
  Ly1484 long MHC HLA A2 class I binding peptide
GLLSILGFL

SEQ ID NO: 10862 - protein, 9 aa, Artificial Sequence
  Ly1484 long MHC HLA A2 class I binding peptide
VLMTFENLA

SEQ ID NO: 10863 - protein, 9 aa, Artificial Sequence
  Ly1484 long MHC HLA A2 class I binding peptide
ILAVERNKV

SEQ ID NO: 10864 - protein, 9 aa, Artificial Sequence
  Ly1484 long MHC HLA A2 class I binding peptide
YLASEKKSL

SEQ ID NO: 10865 - protein, 9 aa, Artificial Sequence
  Ly1484 long MHC HLA A2 class I binding peptide
ELTPEFFYL

SEQ ID NO: 10866 - protein, 9 aa, Artificial Sequence
  Ly1484 long MHC HLA A2 class I binding peptide
YLMYLNTAA

SEQ ID NO: 10867 - protein, 9 aa, Artificial Sequence
  Ly1484 long MHC HLA A2 class I binding peptide
ILLFILEHI

SEQ ID NO: 10868 - protein, 9 aa, Artificial Sequence
  Ly1484 long MHC HLA A2 class I binding peptide
LLQDIALEI

SEQ ID NO: 10869 - protein, 9 aa, Artificial Sequence
  Ly1484 long MHC HLA A3 class I binding peptide
KLMPGRQAK

SEQ ID NO: 10870 - protein, 9 aa, Artificial Sequence
  Ly1484 long MHC HLA A3 class I binding peptide
VLLPPLWNR

SEQ ID NO: 10871 - protein, 9 aa, Artificial Sequence
  Ly1484 long MHC HLA A3 class I binding peptide
CLGSYGSDK

SEQ ID NO: 10872 - protein, 9 aa, Artificial Sequence
  Ly1484 long MHC HLA A3 class I binding peptide
KVILYCLSK

SEQ ID NO: 10873 - protein, 9 aa, Artificial Sequence
  Ly1484 long MHC HLA A3 class I binding peptide
CVWELSMTK

SEQ ID NO: 10874 - protein, 9 aa, Artificial Sequence
  Ly1484 long MHC HLA A3 class I binding peptide
LLFGHQHFY

SEQ ID NO: 10875 - protein, 9 aa, Artificial Sequence
  Ly1484 long MHC HLA A3 class I binding peptide
PLWEETMLK

SEQ ID NO: 10876 - protein, 9 aa, Artificial Sequence
  Ly1484 long MHC HLA A3 class I binding peptide
FLSPNEDVK

SEQ ID NO: 10877 - protein, 9 aa, Artificial Sequence
  Ly1484 long MHC HLA A3 class I binding peptide
SLYKDHVQR

SEQ ID NO: 10878 - protein, 9 aa, Artificial Sequence
  Ly1484 long MHC HLA A3 class I binding peptide
FLVFYNNDR

SEQ ID NO: 10879 - protein, 9 aa, Artificial Sequence
  Ly1484 long MHC HLA A3 class I binding peptide
KLYSGMFSA

SEQ ID NO: 10880 - protein, 9 aa, Artificial Sequence
  Ly1484 long MHC HLA A3 class I binding peptide
GLRLRQALY

SEQ ID NO: 10881 - protein, 9 aa, Artificial Sequence
  Ly1484 long MHC HLA A3 class I binding peptide
NLANPKIFR

SEQ ID NO: 10882 - protein, 9 aa, Artificial Sequence
  Ly1484 long MHC HLA A3 class I binding peptide
RVWKTEDVK

SEQ ID NO: 10883 - protein, 9 aa, Artificial Sequence
  Ly1484 long MHC HLA A3 class I binding peptide
QVPKQLFTK

SEQ ID NO: 10884 - protein, 9 aa, Artificial Sequence
  Ly1484 long MHC HLA A3 class I binding peptide
RMPPFTQAF

SEQ ID NO: 10885 - protein, 9 aa, Artificial Sequence
  Ly1484 long MHC HLA A3 class I binding peptide
KLKFIQRFK

SEQ ID NO: 10886 - protein, 9 aa, Artificial Sequence
  Ly1484 long MHC HLA A3 class I binding peptide
RIMLQKWQK

SEQ ID NO: 10887 - protein, 9 aa, Artificial Sequence
  Ly1484 long MHC HLA A3 class I binding peptide
VILQELLDK

SEQ ID NO: 10888 - protein, 9 aa, Artificial Sequence
  Ly1484 long MHC HLA A3 class I binding peptide
IMLQKWQKR

SEQ ID NO: 10889 - protein, 9 aa, Artificial Sequence
  Ly1484 long MHC HLA A24 class I binding peptide
QYPVFPWVL

SEQ ID NO: 10890 - protein, 9 aa, Artificial Sequence
  Ly1484 long MHC HLA A24 class I binding peptide
FYICENFTL

SEQ ID NO: 10891 - protein, 9 aa, Artificial Sequence
  Ly1484 long MHC HLA A24 class I binding peptide
TYNSNISFL

SEQ ID NO: 10892 - protein, 9 aa, Artificial Sequence
  Ly1484 long MHC HLA A24 class I binding peptide
NYRRRGQEL

SEQ ID NO: 10893 - protein, 9 aa, Artificial Sequence
  Ly1484 long MHC HLA A24 class I binding peptide
DYTSETLNL

SEQ ID NO: 10894 - protein, 9 aa, Artificial Sequence
  Ly1484 long MHC HLA A24 class I binding peptide
SYLVRMPPF

SEQ ID NO: 10895 - protein, 9 aa, Artificial Sequence
  Ly1484 long MHC HLA A24 class I binding peptide
RYPGSDRIM

SEQ ID NO: 10896 - protein, 9 aa, Artificial Sequence
  Ly1484 long MHC HLA A24 class I binding peptide
RFLLQDIAL

SEQ ID NO: 10897 - protein, 9 aa, Artificial Sequence
  Ly1484 long MHC HLA A24 class I binding peptide
LYSSLNKVI

SEQ ID NO: 10898 - protein, 9 aa, Artificial Sequence
  Ly1484 long MHC HLA A24 class I binding peptide
YYTHYSSAI

SEQ ID NO: 10899 - protein, 9 aa, Artificial Sequence
  Ly1484 long MHC HLA A24 class I binding peptide
FFPALHESL

SEQ ID NO: 10900 - protein, 9 aa, Artificial Sequence
  Ly1484 long MHC HLA A24 class I binding peptide
NFGQVPKQL

SEQ ID NO: 10901 - protein, 9 aa, Artificial Sequence
  Ly1484 long MHC HLA A24 class I binding peptide
SYGSDKVLM

SEQ ID NO: 10902 - protein, 9 aa, Artificial Sequence
  Ly1484 long MHC HLA A24 class I binding peptide
GFDDFSCCL

SEQ ID NO: 10903 - protein, 9 aa, Artificial Sequence
  Ly1484 long MHC HLA A24 class I binding peptide
EFFYLPEFL

SEQ ID NO: 10904 - protein, 9 aa, Artificial Sequence
  Ly1484 long MHC HLA A24 class I binding peptide
YFYGDRMDL

SEQ ID NO: 10905 - protein, 9 aa, Artificial Sequence
  Ly1484 long MHC HLA A24 class I binding peptide
SFCSFQPSL

SEQ ID NO: 10906 - protein, 9 aa, Artificial Sequence
  Ly1484 long MHC HLA A24 class I binding peptide
RGLRLRQAL

SEQ ID NO: 10907 - protein, 9 aa, Artificial Sequence
  Ly1484 long MHC HLA A24 class I binding peptide
RGQELYASL

SEQ ID NO: 10908 - protein, 9 aa, Artificial Sequence
  Ly1484 long MHC HLA A24 class I binding peptide
KNLALSREL

SEQ ID NO: 10909 - protein, 9 aa, Artificial Sequence
  Ly1484 short MHC HLA A2 class I binding peptide
YLPEFLTNC

SEQ ID NO: 10910 - protein, 9 aa, Artificial Sequence
  Ly1484 short MHC HLA A2 class I binding peptide
ILWDLDHLT

SEQ ID NO: 10911 - protein, 9 aa, Artificial Sequence
  Ly1484 short MHC HLA A2 class I binding peptide
ALQGGSFDV

SEQ ID NO: 10912 - protein, 9 aa, Artificial Sequence
  Ly1484 short MHC HLA A2 class I binding peptide
MQYPVFPWV

SEQ ID NO: 10913 - protein, 9 aa, Artificial Sequence
  Ly1484 short MHC HLA A2 class I binding peptide
ALYGHTQAV

SEQ ID NO: 10914 - protein, 9 aa, Artificial Sequence
  Ly1484 short MHC HLA A2 class I binding peptide
YLVRMPPFT

SEQ ID NO: 10915 - protein, 9 aa, Artificial Sequence
  Ly1484 short MHC HLA A2 class I binding peptide
VLMTFENLA

SEQ ID NO: 10916 - protein, 9 aa, Artificial Sequence
  Ly1484 short MHC HLA A2 class I binding peptide
ILAVERNKV

SEQ ID NO: 10917 - protein, 9 aa, Artificial Sequence
  Ly1484 short MHC HLA A2 class I binding peptide
ELTPEFFYL

SEQ ID NO: 10918 - protein, 9 aa, Artificial Sequence
  Ly1484 short MHC HLA A2 class I binding peptide
YLMYLNTAA

SEQ ID NO: 10919 - protein, 9 aa, Artificial Sequence
  Ly1484 short MHC HLA A2 class I binding peptide
VLADYTSET

SEQ ID NO: 10920 - protein, 9 aa, Artificial Sequence
  Ly1484 short MHC HLA A2 class I binding peptide
RMFHSVKST

SEQ ID NO: 10921 - protein, 9 aa, Artificial Sequence
  Ly1484 short MHC HLA A2 class I binding peptide
SNFEYLMYL

SEQ ID NO: 10922 - protein, 9 aa, Artificial Sequence
  Ly1484 short MHC HLA A2 class I binding peptide
KVLMTFENL

SEQ ID NO: 10923 - protein, 9 aa, Artificial Sequence
  Ly1484 short MHC HLA A2 class I binding peptide
LLPPLWNRT

SEQ ID NO: 10924 - protein, 9 aa, Artificial Sequence
  Ly1484 short MHC HLA A2 class I binding peptide
QLFTKPHPA

SEQ ID NO: 10925 - protein, 9 aa, Artificial Sequence
  Ly1484 short MHC HLA A2 class I binding peptide
GAHLSLWNV

SEQ ID NO: 10926 - protein, 9 aa, Artificial Sequence
  Ly1484 short MHC HLA A2 class I binding peptide
WDLDHLTHV

SEQ ID NO: 10927 - protein, 9 aa, Artificial Sequence
  Ly1484 short MHC HLA A2 class I binding peptide
FISLHRKAL

SEQ ID NO: 10928 - protein, 9 aa, Artificial Sequence
  Ly1484 short MHC HLA A2 class I binding peptide
CILWDLDHL

SEQ ID NO: 10929 - protein, 9 aa, Artificial Sequence
  Ly1484 short MHC HLA A3 class I binding peptide
VLLPPLWNR

SEQ ID NO: 10930 - protein, 9 aa, Artificial Sequence
  Ly1484 short MHC HLA A3 class I binding peptide
CLGSYGSDK

SEQ ID NO: 10931 - protein, 9 aa, Artificial Sequence
  Ly1484 short MHC HLA A3 class I binding peptide
CVWELSMTK

SEQ ID NO: 10932 - protein, 9 aa, Artificial Sequence
  Ly1484 short MHC HLA A3 class I binding peptide
GLRLRQALY

SEQ ID NO: 10933 - protein, 9 aa, Artificial Sequence
  Ly1484 short MHC HLA A3 class I binding peptide
NLANPKIFR

SEQ ID NO: 10934 - protein, 9 aa, Artificial Sequence
  Ly1484 short MHC HLA A3 class I binding peptide
RVWKTEDVK

SEQ ID NO: 10935 - protein, 9 aa, Artificial Sequence
  Ly1484 short MHC HLA A3 class I binding peptide
QVPKQLFTK

SEQ ID NO: 10936 - protein, 9 aa, Artificial Sequence
  Ly1484 short MHC HLA A3 class I binding peptide
RMPPFTQAF

SEQ ID NO: 10937 - protein, 9 aa, Artificial Sequence
  Ly1484 short MHC HLA A3 class I binding peptide
KLKFIQRFK

SEQ ID NO: 10938 - protein, 9 aa, Artificial Sequence
  Ly1484 short MHC HLA A3 class I binding peptide
TILGFVSNF

SEQ ID NO: 10939 - protein, 9 aa, Artificial Sequence
  Ly1484 short MHC HLA A3 class I binding peptide
SLPGHPQPF

SEQ ID NO: 10940 - protein, 9 aa, Artificial Sequence
  Ly1484 short MHC HLA A3 class I binding peptide
WIDLIFGYK

SEQ ID NO: 10941 - protein, 9 aa, Artificial Sequence
  Ly1484 short MHC HLA A3 class I binding peptide
NLHHWIDLI

SEQ ID NO: 10942 - protein, 9 aa, Artificial Sequence
  Ly1484 short MHC HLA A3 class I binding peptide
YMQYPVFPW

SEQ ID NO: 10943 - protein, 9 aa, Artificial Sequence
  Ly1484 short MHC HLA A3 class I binding peptide
ELTPEFFYL

SEQ ID NO: 10944 - protein, 9 aa, Artificial Sequence
  Ly1484 short MHC HLA A3 class I binding peptide
ALYGHTQAV

SEQ ID NO: 10945 - protein, 9 aa, Artificial Sequence
  Ly1484 short MHC HLA A3 class I binding peptide
YLPEFLTNC

SEQ ID NO: 10946 - protein, 9 aa, Artificial Sequence
  Ly1484 short MHC HLA A3 class I binding peptide
IIVASYLVR

SEQ ID NO: 10947 - protein, 9 aa, Artificial Sequence
  Ly1484 short MHC HLA A3 class I binding peptide
DMTVQCHYY

SEQ ID NO: 10948 - protein, 9 aa, Artificial Sequence
  Ly1484 short MHC HLA A3 class I binding peptide
QLFTKPHPA

SEQ ID NO: 10949 - protein, 9 aa, Artificial Sequence
  Ly1484 short MHC HLA A24 class I binding peptide
QYPVFPWVL

SEQ ID NO: 10950 - protein, 9 aa, Artificial Sequence
  Ly1484 short MHC HLA A24 class I binding peptide
DYTSETLNL

SEQ ID NO: 10951 - protein, 9 aa, Artificial Sequence
  Ly1484 short MHC HLA A24 class I binding peptide
SYLVRMPPF

SEQ ID NO: 10952 - protein, 9 aa, Artificial Sequence
  Ly1484 short MHC HLA A24 class I binding peptide
YYTHYSSAI

SEQ ID NO: 10953 - protein, 9 aa, Artificial Sequence
  Ly1484 short MHC HLA A24 class I binding peptide
NFGQVPKQL

SEQ ID NO: 10954 - protein, 9 aa, Artificial Sequence
  Ly1484 short MHC HLA A24 class I binding peptide
SYGSDKVLM

SEQ ID NO: 10955 - protein, 9 aa, Artificial Sequence
  Ly1484 short MHC HLA A24 class I binding peptide
GFDDFSCCL

SEQ ID NO: 10956 - protein, 9 aa, Artificial Sequence
  Ly1484 short MHC HLA A24 class I binding peptide
EFFYLPEFL

SEQ ID NO: 10957 - protein, 9 aa, Artificial Sequence
  Ly1484 short MHC HLA A24 class I binding peptide
YFYGDRMDL

SEQ ID NO: 10958 - protein, 9 aa, Artificial Sequence
  Ly1484 short MHC HLA A24 class I binding peptide
RGLRLRQAL

SEQ ID NO: 10959 - protein, 9 aa, Artificial Sequence
  Ly1484 short MHC HLA A24 class I binding peptide
KNLALSREL

SEQ ID NO: 10960 - protein, 9 aa, Artificial Sequence
  Ly1484 short MHC HLA A24 class I binding peptide
KVLMTFENL

SEQ ID NO: 10961 - protein, 9 aa, Artificial Sequence
  Ly1484 short MHC HLA A24 class I binding peptide
TFSWGFDDF

SEQ ID NO: 10962 - protein, 9 aa, Artificial Sequence
  Ly1484 short MHC HLA A24 class I binding peptide
FYLPEFLTN

SEQ ID NO: 10963 - protein, 9 aa, Artificial Sequence
  Ly1484 short MHC HLA A24 class I binding peptide
ANPKIFRDL

SEQ ID NO: 10964 - protein, 9 aa, Artificial Sequence
  Ly1484 short MHC HLA A24 class I binding peptide
SFDVADRMF

SEQ ID NO: 10965 - protein, 9 aa, Artificial Sequence
  Ly1484 short MHC HLA A24 class I binding peptide
KTSPAVTAL

SEQ ID NO: 10966 - protein, 9 aa, Artificial Sequence
  Ly1484 short MHC HLA A24 class I binding peptide
KGRPRGLRL

SEQ ID NO: 10967 - protein, 9 aa, Artificial Sequence
  Ly1484 short MHC HLA A24 class I binding peptide
RNKVLLPPL

SEQ ID NO: 10968 - protein, 9 aa, Artificial Sequence
  Ly1484 short MHC HLA A24 class I binding peptide
EYLMYLNTA

SEQ ID NO: 10969 - protein, 694 aa, Homo sapiens
ELLKSIWYAFTALDVEKSGKVSKSQLKVLSHNLYTVLHIPHDPVALEEHFRDDDDGPVSSQGYMPYLNKYILDKVEEGAFVKEHFDELCWTLTAKKNYRADSNGNSMLSNQDAFRLWCLFNFLSEDKYPLIMVPDEGDEGNHPSPEPVPSTKHPNKTQDPPESPKQSVPKSCWGRLWEPDRALPGVGAGNTTCCSYQAFLLLLQVEYLLKKVLSSMSLEVSLGELEELLAQEAQVAQTTGGLSVWQFLELFNSGRCLRGVGRDTLSMAIHEVYQELIQDVLKQGYLWKRGHLRRNWAERWFQLQPSCLCYFGSEECKEKRGIIPLDAHCCVEVLPDRDGKRCMFCVKTANRTYEMSASDTRQRQEWTAAIQMAIRLQAEGKTSLHKDLKQKRREQREQRERRRAAKEEELLRLQQLQEEKERKLQELELLQEAQRQAERLLQEEEERRRSQHRELQQALEGQLREAEQARASMQAEMELKEEEAARQRQRIKELEEMQQRLQEALQLEVKARRDEESVRIAQTRLLEEEEEKLKQLMQLKEEQERYIERAQQEKEELQQEMAQQSRSLQQAQQQLEEVRQNRQRADEDVEAAQRKLRQASTNVKHWNVQMNRLMHPIEPGDKRPVTSSSFSGFQPPLLAHRDSSLKRLTRWGSQGNRTPSPNSNEQQKSLNGGDEAPAPASTPQEDKLDPAPEN

SEQ ID NO: 10970 - DNA, 2446 bp, Homo sapiens
gaactgctcaagtccatctggtacgcctttaccgcgctggacgtggagaagagtggcaaagtctccaagtcccagctcaaggtgctgtcccacaacctgtacacggtcctgcacatcccccatgaccccgtggccctggaggaacacttccgagatgatgatgacggccctgtgtccagccagggatacatgccctacctcaacaagtacatcctggacaaggtggaggagggggcttttgttaaagagcactttgatgagctgtgctggacgctgacggccaagaagaactatcgggcagatagcaacgggaacagtatgctctccaatcaggatgccttccgcctctggtgcctcttcaacttcctgtctgaggacaagtaccctctgatcatggttcctgatgagggtgatgaagggaaccacccgagccctgaaccagtgccctctactaaacacccaaacaagacccaggatcccccagaaagtcctaaacagagtgtcccaaaaagctgctggggcaggctctgggagccagatagagcactccctggtgttggtgctggcaacaccacctgctgcagctaccaggccttccttctcctgctccaggtggaatacctgctgaaaaaggtactcagcagcatgagcttggaggtgagcttgggtgagctggaggagcttctggcccaggaggcccaggtggcccagaccaccggggggctcagcgtctggcagttcctggagctcttcaattcgggccgctgcctgcggggcgtgggccgggacaccctcagcatggccatccacgaggtctaccaggagctcatccaagatgtcctgaagcagggctacctgtggaagcgagggcacctgagaaggaactgggccgaacgctggttccagctgcagcccagctgcctctgctactttgggagtgaagagtgcaaagagaaaaggggcattatcccgctggatgcacactgctgcgtggaggtgctgccagaccgcgacggaaagcgctgcatgttctgtgtgaagacagccaaccgcacgtatgagatgagcgcctcagacacgcgccagcgccaggagtggacagctgccatccagatggcgatccggctgcaggccgaggggaagacgtccctacacaaggacctgaagcagaaacggcgcgagcagcgggagcagcgggagcggcgccgggcggccaaggaagaggagctgctgcggctgcagcagctgcaggaggagaaggagcggaagctgcaggagctggagctgctgcaggaggcgcagcggcaggccgagcggctgctgcaggaggaggaggaacggcgccgcagccagcaccgcgagctgcagcaggcgctcgagggccaactgcgcgaggcggagcaggcccgggcctccatgcaggctgagatggagctgaaggaggaggaggctgcccggcagcggcagcgcatcaaggagctggaggagatgcagcagcggttgcaggaggccctgcaactagaggtgaaagctcggcgagatgaagaatctgtgcgaatcgctcagaccagactgctggaagaggaggaagagaagctgaagcagttgatgcagctgaaggaggagcaggagcgctacatcgaacgggcgcagcaggagaaggaagagctgcagcaggagatggcacagcagagccgctccctgcagcaggcccagcagcagctggaggaggtgcggcagaaccggcagagggctgacgaggatgtggaggctgcccagagaaaactgcgccaggccagcaccaacgtgaaacactggaatgtccagatgaaccggctgatgcatccaattgagcctggagataagcgtccggtcaccagcagctccttctcaggcttccagccccctctgcttgcccaccgtgactcctccctaaagcgcctgacccgctggggatcccagggcaacaggaccccctcgcccaacagcaatgagcagcagaagtccctcaatggtggggatgaggctcctgccccggcttccacccctcaggaagataaactggatccagcaccagaaaattagcctctcttagccccttgttcttcccaatgtcatatccaccaggacctggccacagctggcctgtgggtgatcccagctcttactaggagagggagctgaggtcctggtgccaggggcccaggccctccaaccataaacagtccaggatggaacctggttcacccttcataccagctccaagccccagaccatgggagctgtctgggatgttgatccttgagaacttggccctgtgctttagacccaaggacccgattcttgggctaggaaagagagaacaagcaagccggggctacctgcccccaggtggccaccaagttgtggaagcacatttctaaataaaaactgctcttagaatgaa

SEQ ID NO: 10971 - DNA, 476 bp, Homo sapiens
ggtgtgcattatgttggatgattgtaaattttcagtgcaaaatgtaccgtgtcctaaatttaaagacatgaaaaatatcccaagatcatactagatcataatagcaattcctttacaaatgaattatggaggtaactgatctctaacagtttccttcatgttgttttaatgcacaagggcagaggatctgctgacccttggaaccagcgtgactaaccacgtgctatagacacttcatggtgtcgcacccagggaagtcaaagcgctttgctccctcactgtctgtgagtcctcagccattagtaccccaccccccgctgctccaaaacttgagttatttcaaatgtttctcactgttcatctctccactgaccccactccagaaagcctggagagagtcccaagatgccacccaccttccccaatccctcgccacagatctgtgtctatctcacactctgtaagtgccgctttgc

SEQ ID NO: 10972 - DNA, 471 bp, Homo sapiens; identical to SEQ ID NO: 5023
  misc_feature (1)...(471): n = g, a, c or t

SEQ ID NO: 10973 - DNA, 379 bp, Homo sapiens; identical to SEQ ID NO: 657
  misc_feature (1)...(379): n = g, a, c or t

SEQ ID NO: 10974 - DNA, 240 bp, Homo sapiens; identical to SEQ ID NO: 617

SEQ ID NO: 10975 - DNA, 32 bp, Artificial Sequence
  PDM-797 PCR primer for His-Ly1452P
gtgtcacaatctacagtcaggcaggattctcc

SEQ ID NO: 10976 - DNA, 35 bp, Artificial Sequence
  PDM-799 PCR primer for His-Ly1452P
gttatgtagcggccgcttatcatgttgctgcagag

SEQ ID NO: 10977 - DNA, 22 bp, Artificial Sequence
  PDM-842 PCR primer for His-TCL-1
gccgagtgcccgacactcgggg

SEQ ID NO: 10978 - DNA, 31 bp, Artificial Sequence
  PDM-843 PCR primer for His-TCL-1
catttgaattcatcagtcatctggcagcagc

SEQ ID NO: 10979 - DNA, 17 bp, Homo sapiens
gacactcaacttcacag

SEQ ID NO: 10980 - DNA, 117 bp, Homo sapiens
  misc_feature (68)...(68): n = g, a, c or t
tgcctactggggccagaagcaatcatcttacctcaggagtcattgaggggctgctcagcacccttggnccagccaccgtggccttattattttgctacggcctcaaaagaaaaatag

SEQ ID NO: 10981 - DNA, 28 bp, Homo sapiens
gaagacgttcagccagggatccactcag

SEQ ID NO: 10982 - DNA, 83 bp, Homo sapiens
gagccttcccagccctctaccccaagagttcacctacctcaactcacctaccccagggcagctacagcctatatatgaaaatg

SEQ ID NO: 10983 - DNA, 72 bp, Homo sapiens
tgaatgttgtaagtggggatgaggtttattcactggcgtactataaccagccggagcaggaatcagtagcag

SEQ ID NO: 10984 - DNA, 32 bp, Homo sapiens
cagaaaccctggggacacatatggaggacaag

SEQ ID NO: 10985 - DNA, 78 bp, Homo sapiens
tggtgaccaagagtacatctcttttcaaatagctggattaggtcctcatgctgctgtggtcattgctggtcatctttg

SEQ ID NO: 10986 - DNA, 21 bp, Homo sapiens
atgcagtcactgaacaggcag

SEQ ID NO: 10987 - DNA, 258 bp, Homo sapiens
attcgctgacccttgtggcgccctcttctgtcttcgaaggagacagcatcgttctgaaatgccagggagaacagaactggaaaattcagaagatggcttaccataaggataacaaagagttatctgttttcaaaaaattctcagatttccttatccaaagtgcagttttaagtgacagtggtaactatttctgtagtaccaaaggacaactctttctctgggataaaacttcaaatatagtaaagataaaagtccaag

SEQ ID NO: 10988 - DNA, 285 bp, Homo sapiens
agctctttcaacgtcctgtgctgactgccagctccttccagcccatcgaagggggtccagtgagcctgaaatgtgagacccggctctctccacagaggttggatgttcaactccagttctgcttcttcagagaaaaccaggtcctggggtcaggctggagcagctctccggagctccagatttctgccgtgtggagtgaagacacagggtcttactggtgcaaggcagaaacggtgactcacaggatcagaaaacagagcctccaatcccagattcacgtgcaga

SEQ ID NO: 10989 - DNA, 97 bp, Homo sapiens
agctctttcaacgtcctgtgctgactgccagctccttccagcccatcgaagggggtccagtgagcctgaaatgtgagacccggctctctccacagag

SEQ ID NO: 10990 - DNA, 288 bp, Homo sapiens
gaatccccatctctaatgtaagcttggagatccgggcccccgggggacaggtgactgaaggacaaaaactgatcctgctctgctcagtggctgggggtacaggaaatgtcacattctcctggtacagagaggccacaggaaccagtatgggaaagaaaacccagcgttccctgtcagcagagctggagatcccagctgtgaaagagagtgatgccggcaaatattactgtagagctgacaacggccatgtgcctatccagagcaaggtggtgaatatccctgtgagaa

SEQ ID NO: 10991 - DNA, 706 bp, Homo sapiens
ccacgcgtccggtcctgaactgggctgaataaacatacctaaatatatgtttagaaatgctcctatgtatcagttttcccaggaacaactataatattatagaaatcttaaaattatttcctaataaaaaattataggatacaaaagaaaaaaaagaaatatgaagagggctggatgggcacaggaaaacaatcagatgagaacaacagatgaccgtgtctgcaggcagcacccagaactgatattcccctcaaacgtctaaatatattgttgagaaaattatctctaactgttctagtgggaatgtgggaatggaaaatatgcaacagccatggggccaggccctttgctgagcctgcaggttgggagtttgtgaatctattgaggcatcacaaatcttttctgatagcccctctgtgtctgtcagttccagtgtctcgccctgtcctcaccctcaggtctcctggggcccaggctgcagtgggggacctgctggagcttcactgtgaggccctgagaggctctcccccaatcttgtaccaattttatcatgaggatgtcacccttgggaacagctcggccccctctggaggaggggcctccttcaacctctctttgactgcagaacattctggaaactactcctgtgaggccaacaacggcctgggggcccagtgcagtgaggcagtgccagtctccatctcag

SEQ ID NO: 10992 - DNA, 279 bp, Homo sapiens
ttccagtgtctcgccctgtcctcaccctcaggtctcctggggcccaggctgcagtgggggacctgctggagcttcactgtgaggccctgagaggctctcccccaatcttgtaccaattttatcatgaggatgtcacccttgggaacagctcggccccctctggaggaggggcctccttcaacctctctttgactgcagaacattctggaaactactcctgtgaggccaacaacggcctgggggcccagtgcagtgaggcagtgccagtctccatctcag

SEQ ID NO: 10993 - DNA, 395 bp, Homo sapiens
gacctgatggctatagaagagacctcatgacagctggagttctctggggactgtttggtgtccttggtttcactggtgttgctttgctgttgtatgccttgttccacaagatatcaggttgtatctaccatttggattctccatattttgctatgacctttccactactgatatagattgaaattacaaaaaaagaagagagaaaagaaaactctccaaaagccaataatttctttttatgcttcataattctgcaaggctctgtgcaatgctcaatgtggtcatactgctaattatacaatatgtcactgttccctgtgcatagtcactggagattaaattatttacacattctttcaaaaaaaaaaaaaaaaaaaaaaaaaaaaaaaaaaaaa

SEQ ID NO: 10994 - DNA, 117 bp, Homo sapiens
gacctgatggctatagaagagacctcatgacagctggagttctctggggactgtttggtgtccttggtttcactggtgttgctttgctgttgtatgccttgttccacaagatatcag

SEQ ID NO: 10995 - DNA, 28 bp, Homo sapiens
gagaaagttctgccactaatgaacccag

SEQ ID NO: 10996 - DNA, 86 bp, Homo sapiens
aggggcttccaggccaaatcctcaagagttcacctattcaagcccaaccccagacatggaggagctgcagccagtgtatgtcaatg

SEQ ID NO: 10997 - DNA, 66 bp, Homo sapiens
tgggctctgtagatgtggatgtggtttattctcaggtctggagcatgcagcagccagaaagctcag

SEQ ID NO: 10998 - DNA, 29 bp, Homo sapiens
caaacatcaggacacttctggagaacaag

SEQ ID NO: 10999 - DNA, 1045 bp, Homo sapiens
gactcccaagtcatctactcttctgtgaagaaatcataacacttggaggaatcagaagggaagatcaacagcaaggatggggcatcattaagacttgctataaaaccttatgaaaatgcttgaggcttatcacctgccacagccagaacgtgcctcaggaggcacctcctgtcatttttgtcctgatgatgtttcttctccaatatcttcttttacctatcaatattcattgaactgctgctacatccagacactgtgcaaataaattatttctgctaccttctcttaagcaatcagtgtgtaaagatttgagggaagaatgaataagagatacaaggtctcaccttcatctactgtgaagtgatgagaacaggacttgatagtggtgtattaacttatttatgtgctgctggatacagtttgctaatattttgttgagaatttttgcaaatatgttcattgggaatattggcctgaaattttcttttccactgtgtctctgccagaatgtttgtatcaggctgatgctggcttcatagaatgagttaggcaggagcccttcctccttgattttttggcatagtttcagcaggattggtaccagttattctttctgcatcttgtagaattcagctatgaatccatctggtctagggcttttgtgttggttggtaagttttttattactaattcaacttcagcgcttgatattggtctaggaggggtttctgtctcttcctggttcaatcttgggagattgtgtgtttccaggaatttagccgtttcctccagattttcttctttatgtgcatcgacttgagtgtaaacataacttatatgcactgggaaaccaaaaaatctgtgtgacttgctttattgcagcatttgttttattttggtagtctggaactgaacctgcaatatcaccaaagtatgcatatagttgcaaaaatgtgatttttgacatagtaaatatgagtatttgcaataaactatgatattacttttgtaagtatatagaataaaatgtaaataatctataaaa

SEQ ID NO: 11000 - DNA, 2580 bp, Homo sapiens; identical to SEQ ID NO: 9609

SEQ ID NO: 11001 - DNA, 1524 bp, Homo sapiens
atgctgctgtggtcattgctggtcatctttgatgcagtcactgaacaggcagattcgctgacccttgtggcgccctcttctgtcttcgaaggagacagcatcgttctgaaatgccagggagaacagaactggaaaattcagaagatggcttaccataaggataacaaagagttatctgttttcaaaaaattctcagatttccttatccaaagtgcagttttaagtgacagtggtaactatttctgtagtaccaaaggacaactctttctctgggataaaacttcaaatatagtaaagataaaagtccaagagctctttcaacgtcctgtgctgactgccagctccttccagcccatcgaagggggtccagtgagcctgaaatgtgagacccggctctctccacagaggttggatgttcaactccagttctgcttcttcagagaaaaccaggtcctggggtcaggctggagcagctctccggagctccagatttctgccgtgtggagtgaagacacagggtcttactggtgcaaggcagaaacggtgactcacaggatcagaaaacagagcctccaatcccagattcacgtgcagagaatccccatctctaatgtaagcttggagatccgggcccccgggggacaggtgactgaaggacaaaaactgatcctgctctgctcagtggctgggggtacaggaaatgtcacattctcctggtacagagaggccacaggaaccagtatgggaaagaaaacccagcgttccctgtcagcagagctggagatcccagctgtgaaagagagtgatgccggcaaatattactgtagagctgacaacggccatgtgcctatccagagcaaggtggtgaatatccctgtgagaattccagtgtctcgccctgtcctcaccctcaggtctcctggggcccaggctgcagtgggggacctgctggagcttcactgtgaggccctgagaggctctcccccaatcttgtaccaattttatcatgaggatgtcacccttgggaacagctcggccccctctggaggaggggcctccttcaacctctctttgactgcagaacattctggaaactactcctgtgaggccaacaacggcctgggggcccagtgcagtgaggcagtgccagtctccatctcaggacctgatggctatagaagagacctcatgacagctggagttctctggggactgtttggtgtccttggtttcactggtgttgctttgctgttgtatgccttgttccacaagatatcaggagaaagttctgccactaatgaacccagaggggcttccaggccaaatcctcaagagttcacctattcaagcccaaccccagacatggaggagctgcagccagtgtatgtcaatgtgggctctgtagatgtggatgtggtttattctcaggtctggagcatgcagcagccagaaagctcagcaaacatcaggacacttctggagaacaaggactcccaagtcatctactcttctgtgaagaaatca

SEQ ID NO: 11002 - DNA, 2295 bp, Homo sapiens
tggtgaccaagagtacatctcttttcaaatagctggattaggtcctcatgctgctgtggtcattgctggtcatctttgatgcagtcactgaacaggcagattcgctgacccttgtggcgccctcttctgtcttcgaaggagacagcatcgttctgaaatgccagggagaacagaactggaaaattcagaagatggcttaccataaggataacaaagagttatctgttttcaaaaaattctcagatttccttatccaaagtgcagttttaagtgacagtggtaactatttctgtagtaccaaaggacaactctttctctgggataaaacttcaaatatagtaaagataaaagtccaaggaatccccatctctaatgtaagcttggagatccgggcccccgggggacaggtgactgaaggacaaaaactgatcctgctctgctcagtggctgggggtacaggaaatgtcacattctcctggtacagagaggccacaggaaccagtatgggaaagaaaacccagcgttccctgtcagcagagctggagatcccagctgtgaaagagagtgatgccggcaaatattactgtagagctgacaacggccatgtgcctatccagagcaaggtggtgaatatccctgtgagaattccagtgtctcgccctgtcctcaccctcaggtctcctggggcccaggctgcagtgggggacctgctggagcttcactgtgaggccctgagaggctctcccccaatcttgtaccaattttatcatgaggatgtcacccttgggaacagctcggccccctctggaggaggggcctccttcaacctctctttgactgcagaacattctggaaactactcctgtgaggccaacaacggcctgggggcccagtgcagtgaggcagtgccagtctccatctcaggacctgatggctatagaagagacctcatgacagctggagttctctggggactgtttggtgtccttggtttcactggtgttgctttgctgttgtatgccttgttccacaagatatcaggagaaagttctgccactaatgaacccagaggggcttccaggccaaatcctcaagagttcacctattcaagcccaaccccagacatggaggagctgcagccagtgtatgtcaatgtgggctctgtagatgtggatgtggtttattctcaggtctggagcatgcagcagccagaaagctcagcaaacatcaggacacttctggagaacaaggactcccaagtcatctactcttctgtgaagaaatcataacacttggaggaatcagaagggaagatcaacagcaaggatggggcatcattaagacttgctataaaaccttatgaaaatgcttgaggcttatcacctgccacagccagaacgtgcctcaggaggcacctcctgtcatttttgtcctgatgatgtttcttctccaatatcttcttttacctatcaatattcattgaactgctgctacatccagacactgtgcaaataaattatttctgctaccttctcttaagcaatcagtgtgtaaagatttgagggaagaatgaataagagatacaaggtctcaccttcatctactgtgaagtgatgagaacaggacttgatagtggtgtattaacttatttatgtgctgctggatacagtttgctaatattttgttgagaatttttgcaaatatgttcattgggaatattggcctgaaattttcttttccactgtgtctctgccagaatgtttgtatcaggctgatgctggcttcatagaatgagttaggcaggagcccttcctccttgattttttggcatagtttcagcaggattggtaccagttattctttctgcatcttgtagaattcagctatgaatccatctggtctagggcttttgtgttggttggtaagttttttattactaattcaacttcagcgcttgatattggtctaggaggggtttctgtctcttcctggttcaatcttgggagattgtgtgtttccaggaatttagccgtttcctccagattttcttctttatgtgcatcgacttgagtgtaaacataacttatatgcactgggaaaccaaaaaatctgtgtgacttgctttattgcagcatttgttttattttggtagtctggaactgaacctgcaatatcaccaaagtatgcatatagttgcaaaaatgtgatttttgacatagtaaatatgagtatttgcaataaactatgatattacttttgtaagtatatagaataaaatgtaaataatctataaaa

SEQ ID NO: 11003 - DNA, 1239 bp, Homo sapiens
atgctgctgtggtcattgctggtcatctttgatgcagtcactgaacaggcagattcgctgacccttgtggcgccctcttctgtcttcgaaggagacagcatcgttctgaaatgccagggagaacagaactggaaaattcagaagatggcttaccataaggataacaaagagttatctgttttcaaaaaattctcagatttccttatccaaagtgcagttttaagtgacagtggtaactatttctgtagtaccaaaggacaactctttctctgggataaaacttcaaatatagtaaagataaaagtccaaggaatccccatctctaatgtaagcttggagatccgggcccccgggggacaggtgactgaaggacaaaaactgatcctgctctgctcagtggctgggggtacaggaaatgtcacattctcctggtacagagaggccacaggaaccagtatgggaaagaaaacccagcgttccctgtcagcagagctggagatcccagctgtgaaagagagtgatgccggcaaatattactgtagagctgacaacggccatgtgcctatccagagcaaggtggtgaatatccctgtgagaattccagtgtctcgccctgtcctcaccctcaggtctcctggggcccaggctgcagtgggggacctgctggagcttcactgtgaggccctgagaggctctcccccaatcttgtaccaattttatcatgaggatgtcacccttgggaacagctcggccccctctggaggaggggcctccttcaacctctctttgactgcagaacattctggaaactactcctgtgaggccaacaacggcctgggggcccagtgcagtgaggcagtgccagtctccatctcaggacctgatggctatagaagagacctcatgacagctggagttctctggggactgtttggtgtccttggtttcactggtgttgctttgctgttgtatgccttgttccacaagatatcaggagaaagttctgccactaatgaacccagaggggcttccaggccaaatcctcaagagttcacctattcaagcccaaccccagacatggaggagctgcagccagtgtatgtcaatgtgggctctgtagatgtggatgtggtttattctcaggtctggagcatgcagcagccagaaagctcagcaaacatcaggacacttctggagaacaaggactcccaagtcatctactcttctgtgaagaaatca

SEQ ID NO: 11004 - DNA, 2301 bp, Homo sapiens
tggtgaccaagagtacatctcttttcaaatagctggattaggtcctcatgctgctgtggtcattgctggtcatctttgatgcagtcactgaacaggcagattcgctgacccttgtggcgccctcttctgtcttcgaaggagacagcatcgttctgaaatgccagggagaacagaactggaaaattcagaagatggcttaccataaggataacaaagagttatctgttttcaaaaaattctcagatttccttatccaaagtgcagttttaagtgacagtggtaactatttctgtagtaccaaaggacaactctttctctgggataaaacttcaaatatagtaaagataaaagtccaagagctctttcaacgtcctgtgctgactgccagctccttccagcccatcgaagggggtccagtgagcctgaaatgtgagacccggctctctccacagaggttggatgttcaactccagttctgcttcttcagagaaaaccaggtcctggggtcaggctggagcagctctccggagctccagatttctgccgtgtggagtgaagacacagggtcttactggtgcaaggcagaaacggtgactcacaggatcagaaaacagagcctccaatcccagattcacgtgcagagaatccccatctctaatgtaagcttggagatccgggcccccgggggacaggtgactgaaggacaaaaactgatcctgctctgctcagtggctgggggtacaggaaatgtcacattctcctggtacagagaggccacaggaaccagtatgggaaagaaaacccagcgttccctgtcagcagagctggagatcccagctgtgaaagagagtgatgccggcaaatattactgtagagctgacaacggccatgtgcctatccagagcaaggtggtgaatatccctgtgagaagacctgatggctatagaagagacctcatgacagctggagttctctggggactgtttggtgtccttggtttcactggtgttgctttgctgttgtatgccttgttccacaagatatcaggagaaagttctgccactaatgaacccagaggggcttccaggccaaatcctcaagagttcacctattcaagcccaaccccagacatggaggagctgcagccagtgtatgtcaatgtgggctctgtagatgtggatgtggtttattctcaggtctggagcatgcagcagccagaaagctcagcaaacatcaggacacttctggagaacaaggactcccaagtcatctactcttctgtgaagaaatcataacacttggaggaatcagaagggaagatcaacagcaaggatggggcatcattaagacttgctataaaaccttatgaaaatgcttgaggcttatcacctgccacagccagaacgtgcctcaggaggcacctcctgtcatttttgtcctgatgatgtttcttctccaatatcttcttttacctatcaatattcattgaactgctgctacatccagacactgtgcaaataaattatttctgctaccttctcttaagcaatcagtgtgtaaagatttgagggaagaatgaataagagatacaaggtctcaccttcatctactgtgaagtgatgagaacaggacttgatagtggtgtattaacttatttatgtgctgctggatacagtttgctaatattttgttgagaatttttgcaaatatgttcattgggaatattggcctgaaattttcttttccactgtgtctctgccagaatgtttgtatcaggctgatgctggcttcatagaatgagttaggcaggagcccttcctccttgattttttggcatagtttcagcaggattggtaccagttattctttctgcatcttgtagaattcagctatgaatccatctggtctagggcttttgtgttggttggtaagttttttattactaattcaacttcagcgcttgatattggtctaggaggggtttctgtctcttcctggttcaatcttgggagattgtgtgtttccaggaatttagccgtttcctccagattttcttctttatgtgcatcgacttgagtgtaaacataacttatatgcactgggaaaccaaaaaatctgtgtgacttgctttattgcagcatttgttttattttggtagtctggaactgaacctgcaatatcaccaaagtatgcatatagttgcaaaaatgtgatttttgacatagtaaatatgagtatttgcaataaactatgatattacttttgtaagtatatagaataaaatgtaaataatctataaaa

SEQ ID NO: 11005 - DNA, 1245 bp, Homo sapiens
atgctgctgtggtcattgctggtcatctttgatgcagtcactgaacaggcagattcgctgacccttgtggcgccctcttctgtcttcgaaggagacagcatcgttctgaaatgccagggagaacagaactggaaaattcagaagatggcttaccataaggataacaaagagttatctgttttcaaaaaattctcagatttccttatccaaagtgcagttttaagtgacagtggtaactatttctgtagtaccaaaggacaactctttctctgggataaaacttcaaatatagtaaagataaaagtccaagagctctttcaacgtcctgtgctgactgccagctccttccagcccatcgaagggggtccagtgagcctgaaatgtgagacccggctctctccacagaggttggatgttcaactccagttctgcttcttcagagaaaaccaggtcctggggtcaggctggagcagctctccggagctccagatttctgccgtgtggagtgaagacacagggtcttactggtgcaaggcagaaacggtgactcacaggatcagaaaacagagcctccaatcccagattcacgtgcagagaatccccatctctaatgtaagcttggagatccgggcccccgggggacaggtgactgaaggacaaaaactgatcctgctctgctcagtggctgggggtacaggaaatgtcacattctcctggtacagagaggccacaggaaccagtatgggaaagaaaacccagcgttccctgtcagcagagctggagatcccagctgtgaaagagagtgatgccggcaaatattactgtagagctgacaacggccatgtgcctatccagagcaaggtggtgaatatccctgtgagaagacctgatggctatagaagagacctcatgacagctggagttctctggggactgtttggtgtccttggtttcactggtgttgctttgctgttgtatgccttgttccacaagatatcaggagaaagttctgccactaatgaacccagaggggcttccaggccaaatcctcaagagttcacctattcaagcccaaccccagacatggaggagctgcagccagtgtatgtcaatgtgggctctgtagatgtggatgtggtttattctcaggtctggagcatgcagcagccagaaagctcagcaaacatcaggacacttctggagaacaaggactcccaagtcatctactcttctgtgaagaaatca

SEQ ID NO: 11006 - DNA, 2016 bp, Homo sapiens
tggtgaccaagagtacatctcttttcaaatagctggattaggtcctcatgctgctgtggtcattgctggtcatctttgatgcagtcactgaacaggcagattcgctgacccttgtggcgccctcttctgtcttcgaaggagacagcatcgttctgaaatgccagggagaacagaactggaaaattcagaagatggcttaccataaggataacaaagagttatctgttttcaaaaaattctcagatttccttatccaaagtgcagttttaagtgacagtggtaactatttctgtagtaccaaaggacaactctttctctgggataaaacttcaaatatagtaaagataaaagtccaaggaatccccatctctaatgtaagcttggagatccgggcccccgggggacaggtgactgaaggacaaaaactgatcctgctctgctcagtggctgggggtacaggaaatgtcacattctcctggtacagagaggccacaggaaccagtatgggaaagaaaacccagcgttccctgtcagcagagctggagatcccagctgtgaaagagagtgatgccggcaaatattactgtagagctgacaacggccatgtgcctatccagagcaaggtggtgaatatccctgtgagaagacctgatggctatagaagagacctcatgacagctggagttctctggggactgtttggtgtccttggtttcactggtgttgctttgctgttgtatgccttgttccacaagatatcaggagaaagttctgccactaatgaacccagaggggcttccaggccaaatcctcaagagttcacctattcaagcccaaccccagacatggaggagctgcagccagtgtatgtcaatgtgggctctgtagatgtggatgtggtttattctcaggtctggagcatgcagcagccagaaagctcagcaaacatcaggacacttctggagaacaaggactcccaagtcatctactcttctgtgaagaaatcataacacttggaggaatcagaagggaagatcaacagcaaggatggggcatcattaagacttgctataaaaccttatgaaaatgcttgaggcttatcacctgccacagccagaacgtgcctcaggaggcacctcctgtcatttttgtcctgatgatgtttcttctccaatatcttcttttacctatcaatattcattgaactgctgctacatccagacactgtgcaaataaattatttctgctaccttctcttaagcaatcagtgtgtaaagatttgagggaagaatgaataagagatacaaggtctcaccttcatctactgtgaagtgatgagaacaggacttgatagtggtgtattaacttatttatgtgctgctggatacagtttgctaatattttgttgagaatttttgcaaatatgttcattgggaatattggcctgaaattttcttttccactgtgtctctgccagaatgtttgtatcaggctgatgctggcttcatagaatgagttaggcaggagcccttcctccttgattttttggcatagtttcagcaggattggtaccagttattctttctgcatcttgtagaattcagctatgaatccatctggtctagggcttttgtgttggttggtaagttttttattactaattcaacttcagcgcttgatattggtctaggaggggtttctgtctcttcctggttcaatcttgggagattgtgtgtttccaggaatttagccgtttcctccagattttcttctttatgtgcatcgacttgagtgtaaacataacttatatgcactgggaaaccaaaaaatctgtgtgacttgctttattgcagcatttgttttattttggtagtctggaactgaacctgcaatatcaccaaagtatgcatatagttgcaaaaatgtgatttttgacatagtaaatatgagtatttgcaataaactatgatattacttttgtaagtatatagaataaaatgtaaataatctataaaa

SEQ ID NO: 11007 - DNA, 960 bp, Homo sapiens
atgctgctgtggtcattgctggtcatctttgatgcagtcactgaacaggcagattcgctgacccttgtggcgccctcttctgtcttcgaaggagacagcatcgttctgaaatgccagggagaacagaactggaaaattcagaagatggcttaccataaggataacaaagagttatctgttttcaaaaaattctcagatttccttatccaaagtgcagttttaagtgacagtggtaactatttctgtagtaccaaaggacaactctttctctgggataaaacttcaaatatagtaaagataaaagtccaaggaatccccatctctaatgtaagcttggagatccgggcccccgggggacaggtgactgaaggacaaaaactgatcctgctctgctcagtggctgggggtacaggaaatgtcacattctcctggtacagagaggccacaggaaccagtatgggaaagaaaacccagcgttccctgtcagcagagctggagatcccagctgtgaaagagagtgatgccggcaaatattactgtagagctgacaacggccatgtgcctatccagagcaaggtggtgaatatccctgtgagaagacctgatggctatagaagagacctcatgacagctggagttctctggggactgtttggtgtccttggtttcactggtgttgctttgctgttgtatgccttgttccacaagatatcaggagaaagttctgccactaatgaacccagaggggcttccaggccaaatcctcaagagttcacctattcaagcccaaccccagacatggaggagctgcagccagtgtatgtcaatgtgggctctgtagatgtggatgtggtttattctcaggtctggagcatgcagcagccagaaagctcagcaaacatcaggacacttctggagaacaaggactcccaagtcatctactcttctgtgaagaaatca

SEQ ID NO: 11008 - DNA, 1604 bp, Homo sapiens
tggtgaccaagagtacatctcttttcaaatagctggattaggtcctcatgctgctgtggtcattgctggtcatctttgatgcagtcactgaacaggcagattcgctgacccttgtggcgccctcttctgtcttcgaaggagacagcatcgttctgaaatgccagggagaacagaactggaaaattcagaagatggcttaccataaggataacaaagagttatctgttttcaaaaaattctcagatttccttatccaaagtgcagttttaagtgacagtggtaactatttctgtagtaccaaaggacaactctttctctgggataaaacttcaaatatagtaaagataaaagtccaagagctctttcaacgtcctgtgctgactgccagctccttccagcccatcgaagggggtccagtgagcctgaaatgtgagacccggctctctccacagaggttggatgttcaactccagttctgcttcttcagagaaaaccaggtcctggggtcaggctggagcagctctccggagctccagatttctgccgtgtggagtgaagacacagggtcttactggtgcaaggcagaaacggtgactcacaggatcagaaaacagagcctccaatcccagattcacgtgcagagaatccccatctctaatgtaagcttggagatccgggcccccgggggacaggtgactgaaggacaaaaactgatcctgctctgctcagtggctgggggtacaggaaatgtcacattctcctggtacagagaggccacaggaaccagtatgggaaagaaaacccagcgttccctgtcagcagagctggagatcccagctgtgaaagagagtgatgccggcaaatattactgtagagctgacaacggccatgtgcctatccagagcaaggtggtgaatatccctgtgagaattccagtgtctcgccctgtcctcaccctcaggtctcctggggcccaggctgcagtgggggacctgctggagcttcactgtgaggccctgagaggctctcccccaatcttgtaccaattttatcatgaggatgtcacccttgggaacagctcggccccctctggaggaggggcctccttcaacctctctttgactgcagaacattctggaaactactcctgtgaggccaacaacggcctgggggcccagtgcagtgaggcagtgccagtctccatctcaggacctgatggctatagaagagacctcatgacagctggagttctctggggactgtttggtgtccttggtttcactggtgttgctttgctgttgtatgccttgttccacaagatatcaggttgtatctaccatttggattctccatattttgctatgacctttccactactgatatagattgaaattacaaaaaaagaagagagaaaagaaaactctccaaaagccaataatttctttttatgcttcataattctgcaaggctctgtgcaatgctcaatgtggtcatactgctaattatacaatatgtcactgttccctgtgcatagtcactggagattaaattatttacacattctttcaaaaaaaaaaaaaaaaaaaaaaaaaaaaaaaaaaaaa

SEQ ID NO: 11009 - DNA, 1335 bp, Homo sapiens
atgctgctgtggtcattgctggtcatctttgatgcagtcactgaacaggcagattcgctgacccttgtggcgccctcttctgtcttcgaaggagacagcatcgttctgaaatgccagggagaacagaactggaaaattcagaagatggcttaccataaggataacaaagagttatctgttttcaaaaaattctcagatttccttatccaaagtgcagttttaagtgacagtggtaactatttctgtagtaccaaaggacaactctttctctgggataaaacttcaaatatagtaaagataaaagtccaagagctctttcaacgtcctgtgctgactgccagctccttccagcccatcgaagggggtccagtgagcctgaaatgtgagacccggctctctccacagaggttggatgttcaactccagttctgcttcttcagagaaaaccaggtcctggggtcaggctggagcagctctccggagctccagatttctgccgtgtggagtgaagacacagggtcttactggtgcaaggcagaaacggtgactcacaggatcagaaaacagagcctccaatcccagattcacgtgcagagaatccccatctctaatgtaagcttggagatccgggcccccgggggacaggtgactgaaggacaaaaactgatcctgctctgctcagtggctgggggtacaggaaatgtcacattctcctggtacagagaggccacaggaaccagtatgggaaagaaaacccagcgttccctgtcagcagagctggagatcccagctgtgaaagagagtgatgccggcaaatattactgtagagctgacaacggccatgtgcctatccagagcaaggtggtgaatatccctgtgagaattccagtgtctcgccctgtcctcaccctcaggtctcctggggcccaggctgcagtgggggacctgctggagcttcactgtgaggccctgagaggctctcccccaatcttgtaccaattttatcatgaggatgtcacccttgggaacagctcggccccctctggaggaggggcctccttcaacctctctttgactgcagaacattctggaaactactcctgtgaggccaacaacggcctgggggcccagtgcagtgaggcagtgccagtctccatctcaggacctgatggctatagaagagacctcatgacagctggagttctctggggactgtttggtgtccttggtttcactggtgttgctttgctgttgtatgccttgttccacaagatatcaggttgtatctaccatttggattctccatattttgctatgacctttccactactgata

SEQ ID NO: 11010 - DNA, 1319 bp, Homo sapiens
tggtgaccaagagtacatctcttttcaaatagctggattaggtcctcatgctgctgtggtcattgctggtcatctttgatgcagtcactgaacaggcagattcgctgacccttgtggcgccctcttctgtcttcgaaggagacagcatcgttctgaaatgccagggagaacagaactggaaaattcagaagatggcttaccataaggataacaaagagttatctgttttcaaaaaattctcagatttccttatccaaagtgcagttttaagtgacagtggtaactatttctgtagtaccaaaggacaactctttctctgggataaaacttcaaatatagtaaagataaaagtccaaggaatccccatctctaatgtaagcttggagatccgggcccccgggggacaggtgactgaaggacaaaaactgatcctgctctgctcagtggctgggggtacaggaaatgtcacattctcctggtacagagaggccacaggaaccagtatgggaaagaaaacccagcgttccctgtcagcagagctggagatcccagctgtgaaagagagtgatgccggcaaatattactgtagagctgacaacggccatgtgcctatccagagcaaggtggtgaatatccctgtgagaattccagtgtctcgccctgtcctcaccctcaggtctcctggggcccaggctgcagtgggggacctgctggagcttcactgtgaggccctgagaggctctcccccaatcttgtaccaattttatcatgaggatgtcacccttgggaacagctcggccccctctggaggaggggcctccttcaacctctctttgactgcagaacattctggaaactactcctgtgaggccaacaacggcctgggggcccagtgcagtgaggcagtgccagtctccatctcaggacctgatggctatagaagagacctcatgacagctggagttctctggggactgtttggtgtccttggtttcactggtgttgctttgctgttgtatgccttgttccacaagatatcaggttgtatctaccatttggattctccatattttgctatgacctttccactactgatatagattgaaattacaaaaaaagaagagagaaaagaaaactctccaaaagccaataatttctttttatgcttcataattctgcaaggctctgtgcaatgctcaatgtggtcatactgctaattatacaatatgtcactgttccctgtgcatagtcactggagattaaattatttacacattctttcaaaaaaaaaaaaaaaaaaaaaaaaaaaaaaaaaaaaa

SEQ ID NO: 11011 - DNA, 1050 bp, Homo sapiens
atgctgctgtggtcattgctggtcatctttgatgcagtcactgaacaggcagattcgctgacccttgtggcgccctcttctgtcttcgaaggagacagcatcgttctgaaatgccagggagaacagaactggaaaattcagaagatggcttaccataaggataacaaagagttatctgttttcaaaaaattctcagatttccttatccaaagtgcagttttaagtgacagtggtaactatttctgtagtaccaaaggacaactctttctctgggataaaacttcaaatatagtaaagataaaagtccaaggaatccccatctctaatgtaagcttggagatccgggcccccgggggacaggtgactgaaggacaaaaactgatcctgctctgctcagtggctgggggtacaggaaatgtcacattctcctggtacagagaggccacaggaaccagtatgggaaagaaaacccagcgttccctgtcagcagagctggagatcccagctgtgaaagagagtgatgccggcaaatattactgtagagctgacaacggccatgtgcctatccagagcaaggtggtgaatatccctgtgagaattccagtgtctcgccctgtcctcaccctcaggtctcctggggcccaggctgcagtgggggacctgctggagcttcactgtgaggccctgagaggctctcccccaatcttgtaccaattttatcatgaggatgtcacccttgggaacagctcggccccctctggaggaggggcctccttcaacctctctttgactgcagaacattctggaaactactcctgtgaggccaacaacggcctgggggcccagtgcagtgaggcagtgccagtctccatctcaggacctgatggctatagaagagacctcatgacagctggagttctctggggactgtttggtgtccttggtttcactggtgttgctttgctgttgtatgccttgttccacaagatatcaggttgtatctaccatttggattctccatattttgctatgacctttccactactgata

SEQ ID NO: 11012 - DNA, 1325 bp, Homo sapiens
tggtgaccaagagtacatctcttttcaaatagctggattaggtcctcatgctgctgtggtcattgctggtcatctttgatgcagtcactgaacaggcagattcgctgacccttgtggcgccctcttctgtcttcgaaggagacagcatcgttctgaaatgccagggagaacagaactggaaaattcagaagatggcttaccataaggataacaaagagttatctgttttcaaaaaattctcagatttccttatccaaagtgcagttttaagtgacagtggtaactatttctgtagtaccaaaggacaactctttctctgggataaaacttcaaatatagtaaagataaaagtccaagagctctttcaacgtcctgtgctgactgccagctccttccagcccatcgaagggggtccagtgagcctgaaatgtgagacccggctctctccacagaggttggatgttcaactccagttctgcttcttcagagaaaaccaggtcctggggtcaggctggagcagctctccggagctccagatttctgccgtgtggagtgaagacacagggtcttactggtgcaaggcagaaacggtgactcacaggatcagaaaacagagcctccaatcccagattcacgtgcagagaatccccatctctaatgtaagcttggagatccgggcccccgggggacaggtgactgaaggacaaaaactgatcctgctctgctcagtggctgggggtacaggaaatgtcacattctcctggtacagagaggccacaggaaccagtatgggaaagaaaacccagcgttccctgtcagcagagctggagatcccagctgtgaaagagagtgatgccggcaaatattactgtagagctgacaacggccatgtgcctatccagagcaaggtggtgaatatccctgtgagaagacctgatggctatagaagagacctcatgacagctggagttctctggggactgtttggtgtccttggtttcactggtgttgctttgctgttgtatgccttgttccacaagatatcaggttgtatctaccatttggattctccatattttgctatgacctttccactactgatatagattgaaattacaaaaaaagaagagagaaaagaaaactctccaaaagccaataatttctttttatgcttcataattctgcaaggctctgtgcaatgctcaatgtggtcatactgctaattatacaatatgtcactgttccctgtgcatagtcactggagattaaattatttacacattctttcaaaaaaaaaaaaaaaaaaaaaaaaaaaaaaaaaaaaa

SEQ ID NO: 11013 - DNA, 1056 bp, Homo sapiens
atgctgctgtggtcattgctggtcatctttgatgcagtcactgaacaggcagattcgctgacccttgtggcgccctcttctgtcttcgaaggagacagcatcgttctgaaatgccagggagaacagaactggaaaattcagaagatggcttaccataaggataacaaagagttatctgttttcaaaaaattctcagatttccttatccaaagtgcagttttaagtgacagtggtaactatttctgtagtaccaaaggacaactctttctctgggataaaacttcaaatatagtaaagataaaagtccaagagctctttcaacgtcctgtgctgactgccagctccttccagcccatcgaagggggtccagtgagcctgaaatgtgagacccggctctctccacagaggttggatgttcaactccagttctgcttcttcagagaaaaccaggtcctggggtcaggctggagcagctctccggagctccagatttctgccgtgtggagtgaagacacagggtcttactggtgcaaggcagaaacggtgactcacaggatcagaaaacagagcctccaatcccagattcacgtgcagagaatccccatctctaatgtaagcttggagatccgggcccccgggggacaggtgactgaaggacaaaaactgatcctgctctgctcagtggctgggggtacaggaaatgtcacattctcctggtacagagaggccacaggaaccagtatgggaaagaaaacccagcgttccctgtcagcagagctggagatcccagctgtgaaagagagtgatgccggcaaatattactgtagagctgacaacggccatgtgcctatccagagcaaggtggtgaatatccctgtgagaagacctgatggctatagaagagacctcatgacagctggagttctctggggactgtttggtgtccttggtttcactggtgttgctttgctgttgtatgccttgttccacaagatatcaggttgtatctaccatttggattctccatattttgctatgacctttccactactgata

SEQ ID NO: 11014 - DNA, 1040 bp, Homo sapiens
tggtgaccaagagtacatctcttttcaaatagctggattaggtcctcatgctgctgtggtcattgctggtcatctttgatgcagtcactgaacaggcagattcgctgacccttgtggcgccctcttctgtcttcgaaggagacagcatcgttctgaaatgccagggagaacagaactggaaaattcagaagatggcttaccataaggataacaaagagttatctgttttcaaaaaattctcagatttccttatccaaagtgcagttttaagtgacagtggtaactatttctgtagtaccaaaggacaactctttctctgggataaaacttcaaatatagtaaagataaaagtccaaggaatccccatctctaatgtaagcttggagatccgggcccccgggggacaggtgactgaaggacaaaaactgatcctgctctgctcagtggctgggggtacaggaaatgtcacattctcctggtacagagaggccacaggaaccagtatgggaaagaaaacccagcgttccctgtcagcagagctggagatcccagctgtgaaagagagtgatgccggcaaatattactgtagagctgacaacggccatgtgcctatccagagcaaggtggtgaatatccctgtgagaagacctgatggctatagaagagacctcatgacagctggagttctctggggactgtttggtgtccttggtttcactggtgttgctttgctgttgtatgccttgttccacaagatatcaggttgtatctaccatttggattctccatattttgctatgacctttccactactgatatagattgaaattacaaaaaaagaagagagaaaagaaaactctccaaaagccaataatttctttttatgcttcataattctgcaaggctctgtgcaatgctcaatgtggtcatactgctaattatacaatatgtcactgttccctgtgcatagtcactggagattaaattatttacacattctttcaaaaaaaaaaaaaaaaaaaaaaaaaaaaaaaaaaaaa

SEQ ID NO: 11015 - DNA, 771 bp, Homo sapiens
atgctgctgtggtcattgctggtcatctttgatgcagtcactgaacaggcagattcgctgacccttgtggcgccctcttctgtcttcgaaggagacagcatcgttctgaaatgccagggagaacagaactggaaaattcagaagatggcttaccataaggataacaaagagttatctgttttcaaaaaattctcagatttccttatccaaagtgcagttttaagtgacagtggtaactatttctgtagtaccaaaggacaactctttctctgggataaaacttcaaatatagtaaagataaaagtccaaggaatccccatctctaatgtaagcttggagatccgggcccccgggggacaggtgactgaaggacaaaaactgatcctgctctgctcagtggctgggggtacaggaaatgtcacattctcctggtacagagaggccacaggaaccagtatgggaaagaaaacccagcgttccctgtcagcagagctggagatcccagctgtgaaagagagtgatgccggcaaatattactgtagagctgacaacggccatgtgcctatccagagcaaggtggtgaatatccctgtgagaagacctgatggctatagaagagacctcatgacagctggagttctctggggactgtttggtgtccttggtttcactggtgttgctttgctgttgtatgccttgttccacaagatatcaggttgtatctaccatttggattctccatattttgctatgacctttccactactgata

SEQ ID NO: 11016 - DNA, 2566 bp, Homo sapiens
  misc_feature (85)...(85): n = a, g, c or t
gacactcaacttcacagtgcctactggggccagaagcaatcatcttacctcaggagtcattgaggggctgctcagcacccttggnccagccaccgtggccttattattttgctacggcctcaaaagaaaaataggaagacgttcagccagggatccactcaggagccttcccagccctctaccccaagagttcacctacctcaactcacctaccccagggcagctacagcctatatatgaaaatgtgaatgttgtaagtggggatgaggtttattcactggcgtactataaccagccggagcaggaatcagtagcagcagaaaccctggggacacatatggaggacaagatgcagtcactgaacaggcagattcgctgacccttgtggcgccctcttctgtcttcgaaggagacagcatcgttctgaaatgccagggagaacagaactggaaaattcagaagatggcttaccataaggataacaaagagttatctgttttcaaaaaattctcagatttccttatccaaagtgcagttttaagtgacagtggtaactatttctgtagtaccaaaggacaactctttctctgggataaaacttcaaatatagtaaagataaaagtccaaggaatccccatctctaatgtaagcttggagatccgggcccccgggggacaggtgactgaaggacaaaaactgatcctgctctgctcagtggctgggggtacaggaaatgtcacattctcctggtacagagaggccacaggaaccagtatgggaaagaaaacccagcgttccctgtcagcagagctggagatcccagctgtgaaagagagtgatgccggcaaatattactgtagagctgacaacggccatgtgcctatccagagcaaggtggtgaatatccctgtgagaattccagtgtctcgccctgtcctcaccctcaggtctcctggggcccaggctgcagtgggggacctgctggagcttcactgtgaggccctgagaggctctcccccaatcttgtaccaattttatcatgaggatgtcacccttgggaacagctcggccccctctggaggaggggcctccttcaacctctctttgactgcagaacattctggaaactactcctgtgaggccaacaacggcctgggggcccagtgcagtgaggcagtgccagtctccatctcaggacctgatggctatagaagagacctcatgacagctggagttctctggggactgtttggtgtccttggtttcactggtgttgctttgctgttgtatgccttgttccacaagatatcaggagaaagttctgccactaatgaacccagaggggcttccaggccaaatcctcaagagttcacctattcaagcccaaccccagacatggaggagctgcagccagtgtatgtcaatgtgggctctgtagatgtggatgtggtttattctcaggtctggagcatgcagcagccagaaagctcagcaaacatcaggacacttctggagaacaaggactcccaagtcatctactcttctgtgaagaaatcataacacttggaggaatcagaagggaagatcaacagcaaggatggggcatcattaagacttgctataaaaccttatgaaaatgcttgaggcttatcacctgccacagccagaacgtgcctcaggaggcacctcctgtcatttttgtcctgatgatgtttcttctccaatatcttcttttacctatcaatattcattgaactgctgctacatccagacactgtgcaaataaattatttctgctaccttctcttaagcaatcagtgtgtaaagatttgagggaagaatgaataagagatacaaggtctcaccttcatctactgtgaagtgatgagaacaggacttgatagtggtgtattaacttatttatgtgctgctggatacagtttgctaatattttgttgagaatttttgcaaatatgttcattgggaatattggcctgaaattttcttttccactgtgtctctgccagaatgtttgtatcaggctgatgctggcttcatagaatgagttaggcaggagcccttcctccttgattttttggcatagtttcagcaggattggtaccagttattctttctgcatcttgtagaattcagctatgaatccatctggtctagggcttttgtgttggttggtaagttttttattactaattcaacttcagcgcttgatattggtctaggaggggtttctgtctcttcctggttcaatcttgggagattgtgtgtttccaggaatttagccgtttcctccagattttcttctttatgtgcatcgacttgagtgtaaacataacttatatgcactgggaaaccaaaaaatctgtgtgacttgctttattgcagcatttgttttattttggtagtctggaactgaacctgcaatatcaccaaagtatgcatatagttgcaaaaatgtgatttttgacatagtaaatatgagtatttgcaataaactatgatattacttttgtaagtatatagaataaaatgtaaataatctataaaa

SEQ ID NO: 11017 - DNA, 1095 bp, Homo sapiens
atggcttaccataaggataacaaagagttatctgttttcaaaaaattctcagatttccttatccaaagtgcagttttaagtgacagtggtaactatttctgtagtaccaaaggacaactctttctctgggataaaacttcaaatatagtaaagataaaagtccaaggaatccccatctctaatgtaagcttggagatccgggcccccgggggacaggtgactgaaggacaaaaactgatcctgctctgctcagtggctgggggtacaggaaatgtcacattctcctggtacagagaggccacaggaaccagtatgggaaagaaaacccagcgttccctgtcagcagagctggagatcccagctgtgaaagagagtgatgccggcaaatattactgtagagctgacaacggccatgtgcctatccagagcaaggtggtgaatatccctgtgagaattccagtgtctcgccctgtcctcaccctcaggtctcctggggcccaggctgcagtgggggacctgctggagcttcactgtgaggccctgagaggctctcccccaatcttgtaccaattttatcatgaggatgtcacccttgggaacagctcggccccctctggaggaggggcctccttcaacctctctttgactgcagaacattctggaaactactcctgtgaggccaacaacggcctgggggcccagtgcagtgaggcagtgccagtctccatctcaggacctgatggctatagaagagacctcatgacagctggagttctctggggactgtttggtgtccttggtttcactggtgttgctttgctgttgtatgccttgttccacaagatatcaggagaaagttctgccactaatgaacccagaggggcttccaggccaaatcctcaagagttcacctattcaagcccaaccccagacatggaggagctgcagccagtgtatgtcaatgtgggctctgtagatgtggatgtggtttattctcaggtctggagcatgcagcagccagaaagctcagcaaacatcaggacacttctggagaacaaggactcccaagtcatctactcttctgtgaagaaatca

SEQ ID NO: 11018 - DNA, 2851 bp, Homo sapiens
  misc_feature (85)...(85): n = a, g, c or t
gacactcaacttcacagtgcctactggggccagaagcaatcatcttacctcaggagtcattgaggggctgctcagcacccttggnccagccaccgtggccttattattttgctacggcctcaaaagaaaaataggaagacgttcagccagggatccactcaggagccttcccagccctctaccccaagagttcacctacctcaactcacctaccccagggcagctacagcctatatatgaaaatgtgaatgttgtaagtggggatgaggtttattcactggcgtactataaccagccggagcaggaatcagtagcagcagaaaccctggggacacatatggaggacaagatgcagtcactgaacaggcagattcgctgacccttgtggcgccctcttctgtcttcgaaggagacagcatcgttctgaaatgccagggagaacagaactggaaaattcagaagatggcttaccataaggataacaaagagttatctgttttcaaaaaattctcagatttccttatccaaagtgcagttttaagtgacagtggtaactatttctgtagtaccaaaggacaactctttctctgggataaaacttcaaatatagtaaagataaaagtccaagagctctttcaacgtcctgtgctgactgccagctccttccagcccatcgaagggggtccagtgagcctgaaatgtgagacccggctctctccacagaggttggatgttcaactccagttctgcttcttcagagaaaaccaggtcctggggtcaggctggagcagctctccggagctccagatttctgccgtgtggagtgaagacacagggtcttactggtgcaaggcagaaacggtgactcacaggatcagaaaacagagcctccaatcccagattcacgtgcagagaatccccatctctaatgtaagcttggagatccgggcccccgggggacaggtgactgaaggacaaaaactgatcctgctctgctcagtggctgggggtacaggaaatgtcacattctcctggtacagagaggccacaggaaccagtatgggaaagaaaacccagcgttccctgtcagcagagctggagatcccagctgtgaaagagagtgatgccggcaaatattactgtagagctgacaacggccatgtgcctatccagagcaaggtggtgaatatccctgtgagaattccagtgtctcgccctgtcctcaccctcaggtctcctggggcccaggctgcagtgggggacctgctggagcttcactgtgaggccctgagaggctctcccccaatcttgtaccaattttatcatgaggatgtcacccttgggaacagctcggccccctctggaggaggggcctccttcaacctctctttgactgcagaacattctggaaactactcctgtgaggccaacaacggcctgggggcccagtgcagtgaggcagtgccagtctccatctcaggacctgatggctatagaagagacctcatgacagctggagttctctggggactgtttggtgtccttggtttcactggtgttgctttgctgttgtatgccttgttccacaagatatcaggagaaagttctgccactaatgaacccagaggggcttccaggccaaatcctcaagagttcacctattcaagcccaaccccagacatggaggagctgcagccagtgtatgtcaatgtgggctctgtagatgtggatgtggtttattctcaggtctggagcatgcagcagccagaaagctcagcaaacatcaggacacttctggagaacaaggactcccaagtcatctactcttctgtgaagaaatcataacacttggaggaatcagaagggaagatcaacagcaaggatggggcatcattaagacttgctataaaaccttatgaaaatgcttgaggcttatcacctgccacagccagaacgtgcctcaggaggcacctcctgtcatttttgtcctgatgatgtttcttctccaatatcttcttttacctatcaatattcattgaactgctgctacatccagacactgtgcaaataaattatttctgctaccttctcttaagcaatcagtgtgtaaagatttgagggaagaatgaataagagatacaaggtctcaccttcatctactgtgaagtgatgagaacaggacttgatagtggtgtattaacttatttatgtgctgctggatacagtttgctaatattttgttgagaatttttgcaaatatgttcattgggaatattggcctgaaattttcttttccactgtgtctctgccagaatgtttgtatcaggctgatgctggcttcatagaatgagttaggcaggagcccttcctccttgattttttggcatagtttcagcaggattggtaccagttattctttctgcatcttgtagaattcagctatgaatccatctggtctagggcttttgtgttggttggtaagttttttattactaattcaacttcagcgcttgatattggtctaggaggggtttctgtctcttcctggttcaatcttgggagattgtgtgtttccaggaatttagccgtttcctccagattttcttctttatgtgcatcgacttgagtgtaaacataacttatatgcactgggaaaccaaaaaatctgtgtgacttgctttattgcagcatttgttttattttggtagtctggaactgaacctgcaatatcaccaaagtatgcatatagttgcaaaaatgtgatttttgacatagtaaatatgagtatttgcaataaactatgatattacttttgtaagtatatagaataaaatgtaaataatctataaaa

SEQ ID NO: 11019 - DNA, 1380 bp, Homo sapiens
atggcttaccataaggataacaaagagttatctgttttcaaaaaattctcagatttccttatccaaagtgcagttttaagtgacagtggtaactatttctgtagtaccaaaggacaactctttctctgggataaaacttcaaatatagtaaagataaaagtccaagagctctttcaacgtcctgtgctgactgccagctccttccagcccatcgaagggggtccagtgagcctgaaatgtgagacccggctctctccacagaggttggatgttcaactccagttctgcttcttcagagaaaaccaggtcctggggtcaggctggagcagctctccggagctccagatttctgccgtgtggagtgaagacacagggtcttactggtgcaaggcagaaacggtgactcacaggatcagaaaacagagcctccaatcccagattcacgtgcagagaatccccatctctaatgtaagcttggagatccgggcccccgggggacaggtgactgaaggacaaaaactgatcctgctctgctcagtggctgggggtacaggaaatgtcacattctcctggtacagagaggccacaggaaccagtatgggaaagaaaacccagcgttccctgtcagcagagctggagatcccagctgtgaaagagagtgatgccggcaaatattactgtagagctgacaacggccatgtgcctatccagagcaaggtggtgaatatccctgtgagaattccagtgtctcgccctgtcctcaccctcaggtctcctggggcccaggctgcagtgggggacctgctggagcttcactgtgaggccctgagaggctctcccccaatcttgtaccaattttatcatgaggatgtcacccttgggaacagctcggccccctctggaggaggggcctccttcaacctctctttgactgcagaacattctggaaactactcctgtgaggccaacaacggcctgggggcccagtgcagtgaggcagtgccagtctccatctcaggacctgatggctatagaagagacctcatgacagctggagttctctggggactgtttggtgtccttggtttcactggtgttgctttgctgttgtatgccttgttccacaagatatcaggagaaagttctgccactaatgaacccagaggggcttccaggccaaatcctcaagagttcacctattcaagcccaaccccagacatggaggagctgcagccagtgtatgtcaatgtgggctctgtagatgtggatgtggtttattctcaggtctggagcatgcagcagccagaaagctcagcaaacatcaggacacttctggagaacaaggactcccaagtcatctactcttctgtgaagaaatca

SEQ ID NO: 11020 - DNA, 2287 bp, Homo sapiens
  misc_feature (85)...(85): n = a, g, c or t
gacactcaacttcacagtgcctactggggccagaagcaatcatcttacctcaggagtcattgaggggctgctcagcacccttggnccagccaccgtggccttattattttgctacggcctcaaaagaaaaataggaagacgttcagccagggatccactcaggagccttcccagccctctaccccaagagttcacctacctcaactcacctaccccagggcagctacagcctatatatgaaaatgtgaatgttgtaagtggggatgaggtttattcactggcgtactataaccagccggagcaggaatcagtagcagcagaaaccctggggacacatatggaggacaagatgcagtcactgaacaggcagattcgctgacccttgtggcgccctcttctgtcttcgaaggagacagcatcgttctgaaatgccagggagaacagaactggaaaattcagaagatggcttaccataaggataacaaagagttatctgttttcaaaaaattctcagatttccttatccaaagtgcagttttaagtgacagtggtaactatttctgtagtaccaaaggacaactctttctctgggataaaacttcaaatatagtaaagataaaagtccaaggaatccccatctctaatgtaagcttggagatccgggcccccgggggacaggtgactgaaggacaaaaactgatcctgctctgctcagtggctgggggtacaggaaatgtcacattctcctggtacagagaggccacaggaaccagtatgggaaagaaaacccagcgttccctgtcagcagagctggagatcccagctgtgaaagagagtgatgccggcaaatattactgtagagctgacaacggccatgtgcctatccagagcaaggtggtgaatatccctgtgagaagacctgatggctatagaagagacctcatgacagctggagttctctggggactgtttggtgtccttggtttcactggtgttgctttgctgttgtatgccttgttccacaagatatcaggagaaagttctgccactaatgaacccagaggggcttccaggccaaatcctcaagagttcacctattcaagcccaaccccagacatggaggagctgcagccagtgtatgtcaatgtgggctctgtagatgtggatgtggtttattctcaggtctggagcatgcagcagccagaaagctcagcaaacatcaggacacttctggagaacaaggactcccaagtcatctactcttctgtgaagaaatcataacacttggaggaatcagaagggaagatcaacagcaaggatggggcatcattaagacttgctataaaaccttatgaaaatgcttgaggcttatcacctgccacagccagaacgtgcctcaggaggcacctcctgtcatttttgtcctgatgatgtttcttctccaatatcttcttttacctatcaatattcattgaactgctgctacatccagacactgtgcaaataaattatttctgctaccttctcttaagcaatcagtgtgtaaagatttgagggaagaatgaataagagatacaaggtctcaccttcatctactgtgaagtgatgagaacaggacttgatagtggtgtattaacttatttatgtgctgctggatacagtttgctaatattttgttgagaatttttgcaaatatgttcattgggaatattggcctgaaattttcttttccactgtgtctctgccagaatgtttgtatcaggctgatgctggcttcatagaatgagttaggcaggagcccttcctccttgattttttggcatagtttcagcaggattggtaccagttattctttctgcatcttgtagaattcagctatgaatccatctggtctagggcttttgtgttggttggtaagttttttattactaattcaacttcagcgcttgatattggtctaggaggggtttctgtctcttcctggttcaatcttgggagattgtgtgtttccaggaatttagccgtttcctccagattttcttctttatgtgcatcgacttgagtgtaaacataacttatatgcactgggaaaccaaaaaatctgtgtgacttgctttattgcagcatttgttttattttggtagtctggaactgaacctgcaatatcaccaaagtatgcatatagttgcaaaaatgtgatttttgacatagtaaatatgagtatttgcaataaactatgatattacttttgtaagtatatagaataaaatgtaaataatctataaaa

SEQ ID NO: 11021 - DNA, 816 bp, Homo sapiens
atggcttaccataaggataacaaagagttatctgttttcaaaaaattctcagatttccttatccaaagtgcagttttaagtgacagtggtaactatttctgtagtaccaaaggacaactctttctctgggataaaacttcaaatatagtaaagataaaagtccaaggaatccccatctctaatgtaagcttggagatccgggcccccgggggacaggtgactgaaggacaaaaactgatcctgctctgctcagtggctgggggtacaggaaatgtcacattctcctggtacagagaggccacaggaaccagtatgggaaagaaaacccagcgttccctgtcagcagagctggagatcccagctgtgaaagagagtgatgccggcaaatattactgtagagctgacaacggccatgtgcctatccagagcaaggtggtgaatatccctgtgagaagacctgatggctatagaagagacctcatgacagctggagttctctggggactgtttggtgtccttggtttcactggtgttgctttgctgttgtatgccttgttccacaagatatcaggagaaagttctgccactaatgaacccagaggggcttccaggccaaatcctcaagagttcacctattcaagcccaaccccagacatggaggagctgcagccagtgtatgtcaatgtgggctctgtagatgtggatgtggtttattctcaggtctggagcatgcagcagccagaaagctcagcaaacatcaggacacttctggagaacaaggactcccaagtcatctactcttctgtgaagaaatca

SEQ ID NO: 11022 - DNA, 2572 bp, Homo sapiens
  misc_feature (85)...(85): n = a, g, c or t
gacactcaacttcacagtgcctactggggccagaagcaatcatcttacctcaggagtcattgaggggctgctcagcacccttggnccagccaccgtggccttattattttgctacggcctcaaaagaaaaataggaagacgttcagccagggatccactcaggagccttcccagccctctaccccaagagttcacctacctcaactcacctaccccagggcagctacagcctatatatgaaaatgtgaatgttgtaagtggggatgaggtttattcactggcgtactataaccagccggagcaggaatcagtagcagcagaaaccctggggacacatatggaggacaagatgcagtcactgaacaggcagattcgctgacccttgtggcgccctcttctgtcttcgaaggagacagcatcgttctgaaatgccagggagaacagaactggaaaattcagaagatggcttaccataaggataacaaagagttatctgttttcaaaaaattctcagatttccttatccaaagtgcagttttaagtgacagtggtaactatttctgtagtaccaaaggacaactctttctctgggataaaacttcaaatatagtaaagataaaagtccaagagctctttcaacgtcctgtgctgactgccagctccttccagcccatcgaagggggtccagtgagcctgaaatgtgagacccggctctctccacagaggttggatgttcaactccagttctgcttcttcagagaaaaccaggtcctggggtcaggctggagcagctctccggagctccagatttctgccgtgtggagtgaagacacagggtcttactggtgcaaggcagaaacggtgactcacaggatcagaaaacagagcctccaatcccagattcacgtgcagagaatccccatctctaatgtaagcttggagatccgggcccccgggggacaggtgactgaaggacaaaaactgatcctgctctgctcagtggctgggggtacaggaaatgtcacattctcctggtacagagaggccacaggaaccagtatgggaaagaaaacccagcgttccctgtcagcagagctggagatcccagctgtgaaagagagtgatgccggcaaatattactgtagagctgacaacggccatgtgcctatccagagcaaggtggtgaatatccctgtgagaagacctgatggctatagaagagacctcatgacagctggagttctctggggactgtttggtgtccttggtttcactggtgttgctttgctgttgtatgccttgttccacaagatatcaggagaaagttctgccactaatgaacccagaggggcttccaggccaaatcctcaagagttcacctattcaagcccaaccccagacatggaggagctgcagccagtgtatgtcaatgtgggctctgtagatgtggatgtggtttattctcaggtctggagcatgcagcagccagaaagctcagcaaacatcaggacacttctggagaacaaggactcccaagtcatctactcttctgtgaagaaatcataacacttggaggaatcagaagggaagatcaacagcaaggatggggcatcattaagacttgctataaaaccttatgaaaatgcttgaggcttatcacctgccacagccagaacgtgcctcaggaggcacctcctgtcatttttgtcctgatgatgtttcttctccaatatcttcttttacctatcaatattcattgaactgctgctacatccagacactgtgcaaataaattatttctgctaccttctcttaagcaatcagtgtgtaaagatttgagggaagaatgaataagagatacaaggtctcaccttcatctactgtgaagtgatgagaacaggacttgatagtggtgtattaacttatttatgtgctgctggatacagtttgctaatattttgttgagaatttttgcaaatatgttcattgggaatattggcctgaaattttcttttccactgtgtctctgccagaatgtttgtatcaggctgatgctggcttcatagaatgagttaggcaggagcccttcctccttgattttttggcatagtttcagcaggattggtaccagttattctttctgcatcttgtagaattcagctatgaatccatctggtctagggcttttgtgttggttggtaagttttttattactaattcaacttcagcgcttgatattggtctaggaggggtttctgtctcttcctggttcaatcttgggagattgtgtgtttccaggaatttagccgtttcctccagattttcttctttatgtgcatcgacttgagtgtaaacataacttatatgcactgggaaaccaaaaaatctgtgtgacttgctttattgcagcatttgttttattttggtagtctggaactgaacctgcaatatcaccaaagtatgcatatagttgcaaaaatgtgatttttgacatagtaaatatgagtatttgcaataaactatgatattacttttgtaagtatatagaataaaatgtaaataatctataaaa

SEQ ID NO: 11023 - DNA, 1101 bp, Homo sapiens
atggcttaccataaggataacaaagagttatctgttttcaaaaaattctcagatttccttatccaaagtgcagttttaagtgacagtggtaactatttctgtagtaccaaaggacaactctttctctgggataaaacttcaaatatagtaaagataaaagtccaagagctctttcaacgtcctgtgctgactgccagctccttccagcccatcgaagggggtccagtgagcctgaaatgtgagacccggctctctccacagaggttggatgttcaactccagttctgcttcttcagagaaaaccaggtcctggggtcaggctggagcagctctccggagctccagatttctgccgtgtggagtgaagacacagggtcttactggtgcaaggcagaaacggtgactcacaggatcagaaaacagagcctccaatcccagattcacgtgcagagaatccccatctctaatgtaagcttggagatccgggcccccgggggacaggtgactgaaggacaaaaactgatcctgctctgctcagtggctgggggtacaggaaatgtcacattctcctggtacagagaggccacaggaaccagtatgggaaagaaaacccagcgttccctgtcagcagagctggagatcccagctgtgaaagagagtgatgccggcaaatattactgtagagctgacaacggccatgtgcctatccagagcaaggtggtgaatatccctgtgagaagacctgatggctatagaagagacctcatgacagctggagttctctggggactgtttggtgtccttggtttcactggtgttgctttgctgttgtatgccttgttccacaagatatcaggagaaagttctgccactaatgaacccagaggggcttccaggccaaatcctcaagagttcacctattcaagcccaaccccagacatggaggagctgcagccagtgtatgtcaatgtgggctctgtagatgtggatgtggtttattctcaggtctggagcatgcagcagccagaaagctcagcaaacatcaggacacttctggagaacaaggactcccaagtcatctactcttctgtgaagaaatca

SEQ ID NO: 11024 - DNA, 1590 bp, Homo sapiens
  misc_feature (85)...(85): n = g, a, c or t
gacactcaacttcacagtgcctactggggccagaagcaatcatcttacctcaggagtcattgaggggctgctcagcacccttggnccagccaccgtggccttattattttgctacggcctcaaaagaaaaataggaagacgttcagccagggatccactcaggagccttcccagccctctaccccaagagttcacctacctcaactcacctaccccagggcagctacagcctatatatgaaaatgtgaatgttgtaagtggggatgaggtttattcactggcgtactataaccagccggagcaggaatcagtagcagcagaaaccctggggacacatatggaggacaagatgcagtcactgaacaggcagattcgctgacccttgtggcgccctcttctgtcttcgaaggagacagcatcgttctgaaatgccagggagaacagaactggaaaattcagaagatggcttaccataaggataacaaagagttatctgttttcaaaaaattctcagatttccttatccaaagtgcagttttaagtgacagtggtaactatttctgtagtaccaaaggacaactctttctctgggataaaacttcaaatatagtaaagataaaagtccaaggaatccccatctctaatgtaagcttggagatccgggcccccgggggacaggtgactgaaggacaaaaactgatcctgctctgctcagtggctgggggtacaggaaatgtcacattctcctggtacagagaggccacaggaaccagtatgggaaagaaaacccagcgttccctgtcagcagagctggagatcccagctgtgaaagagagtgatgccggcaaatattactgtagagctgacaacggccatgtgcctatccagagcaaggtggtgaatatccctgtgagaattccagtgtctcgccctgtcctcaccctcaggtctcctggggcccaggctgcagtgggggacctgctggagcttcactgtgaggccctgagaggctctcccccaatcttgtaccaattttatcatgaggatgtcacccttgggaacagctcggccccctctggaggaggggcctccttcaacctctctttgactgcagaacattctggaaactactcctgtgaggccaacaacggcctgggggcccagtgcagtgaggcagtgccagtctccatctcaggacctgatggctatagaagagacctcatgacagctggagttctctggggactgtttggtgtccttggtttcactggtgttgctttgctgttgtatgccttgttccacaagatatcaggttgtatctaccatttggattctccatattttgctatgacctttccactactgatatagattgaaattacaaaaaaagaagagagaaaagaaaactctccaaaagccaataatttctttttatgcttcataattctgcaaggctctgtgcaatgctcaatgtggtcatactgctaattatacaatatgtcactgttccctgtgcatagtcactggagattaaattatttacacattctttcaaaaaaaaaaaaaaaaaaaaaaaaaaaaaaaaaaaaa

SEQ ID NO: 11025 - DNA, 906 bp, Homo sapiens
atggcttaccataaggataacaaagagttatctgttttcaaaaaattctcagatttccttatccaaagtgcagttttaagtgacagtggtaactatttctgtagtaccaaaggacaactctttctctgggataaaacttcaaatatagtaaagataaaagtccaaggaatccccatctctaatgtaagcttggagatccgggcccccgggggacaggtgactgaaggacaaaaactgatcctgctctgctcagtggctgggggtacaggaaatgtcacattctcctggtacagagaggccacaggaaccagtatgggaaagaaaacccagcgttccctgtcagcagagctggagatcccagctgtgaaagagagtgatgccggcaaatattactgtagagctgacaacggccatgtgcctatccagagcaaggtggtgaatatccctgtgagaattccagtgtctcgccctgtcctcaccctcaggtctcctggggcccaggctgcagtgggggacctgctggagcttcactgtgaggccctgagaggctctcccccaatcttgtaccaattttatcatgaggatgtcacccttgggaacagctcggccccctctggaggaggggcctccttcaacctctctttgactgcagaacattctggaaactactcctgtgaggccaacaacggcctgggggcccagtgcagtgaggcagtgccagtctccatctcaggacctgatggctatagaagagacctcatgacagctggagttctctggggactgtttggtgtccttggtttcactggtgttgctttgctgttgtatgccttgttccacaagatatcaggttgtatctaccatttggattctccatattttgctatgacctttccactactgata

SEQ ID NO: 11026 - DNA, 1875 bp, Homo sapiens
  misc_feature (85)...(85): n = g, a, c or t
gacactcaacttcacagtgcctactggggccagaagcaatcatcttacctcaggagtcattgaggggctgctcagcacccttggnccagccaccgtggccttattattttgctacggcctcaaaagaaaaataggaagacgttcagccagggatccactcaggagccttcccagccctctaccccaagagttcacctacctcaactcacctaccccagggcagctacagcctatatatgaaaatgtgaatgttgtaagtggggatgaggtttattcactggcgtactataaccagccggagcaggaatcagtagcagcagaaaccctggggacacatatggaggacaagatgcagtcactgaacaggcagattcgctgacccttgtggcgccctcttctgtcttcgaaggagacagcatcgttctgaaatgccagggagaacagaactggaaaattcagaagatggcttaccataaggataacaaagagttatctgttttcaaaaaattctcagatttccttatccaaagtgcagttttaagtgacagtggtaactatttctgtagtaccaaaggacaactctttctctgggataaaacttcaaatatagtaaagataaaagtccaagagctctttcaacgtcctgtgctgactgccagctccttccagcccatcgaagggggtccagtgagcctgaaatgtgagacccggctctctccacagaggttggatgttcaactccagttctgcttcttcagagaaaaccaggtcctggggtcaggctggagcagctctccggagctccagatttctgccgtgtggagtgaagacacagggtcttactggtgcaaggcagaaacggtgactcacaggatcagaaaacagagcctccaatcccagattcacgtgcagagaatccccatctctaatgtaagcttggagatccgggcccccgggggacaggtgactgaaggacaaaaactgatcctgctctgctcagtggctgggggtacaggaaatgtcacattctcctggtacagagaggccacaggaaccagtatgggaaagaaaacccagcgttccctgtcagcagagctggagatcccagctgtgaaagagagtgatgccggcaaatattactgtagagctgacaacggccatgtgcctatccagagcaaggtggtgaatatccctgtgagaattccagtgtctcgccctgtcctcaccctcaggtctcctggggcccaggctgcagtgggggacctgctggagcttcactgtgaggccctgagaggctctcccccaatcttgtaccaattttatcatgaggatgtcacccttgggaacagctcggccccctctggaggaggggcctccttcaacctctctttgactgcagaacattctggaaactactcctgtgaggccaacaacggcctgggggcccagtgcagtgaggcagtgccagtctccatctcaggacctgatggctatagaagagacctcatgacagctggagttctctggggactgtttggtgtccttggtttcactggtgttgctttgctgttgtatgccttgttccacaagatatcaggttgtatctaccatttggattctccatattttgctatgacctttccactactgatatagattgaaattacaaaaaaagaagagagaaaagaaaactctccaaaagccaataatttctttttatgcttcataattctgcaaggctctgtgcaatgctcaatgtggtcatactgctaattatacaatatgtcactgttccctgtgcatagtcactggagattaaattatttacacattctttcaaaaaaaaaaaaaaaaaaaaaaaaaaaaaaaaaaaaa

SEQ ID NO: 11027 - DNA, 1191 bp, Homo sapiens
atggcttaccataaggataacaaagagttatctgttttcaaaaaattctcagatttccttatccaaagtgcagttttaagtgacagtggtaactatttctgtagtaccaaaggacaactctttctctgggataaaacttcaaatatagtaaagataaaagtccaagagctctttcaacgtcctgtgctgactgccagctccttccagcccatcgaagggggtccagtgagcctgaaatgtgagacccggctctctccacagaggttggatgttcaactccagttctgcttcttcagagaaaaccaggtcctggggtcaggctggagcagctctccggagctccagatttctgccgtgtggagtgaagacacagggtcttactggtgcaaggcagaaacggtgactcacaggatcagaaaacagagcctccaatcccagattcacgtgcagagaatccccatctctaatgtaagcttggagatccgggcccccgggggacaggtgactgaaggacaaaaactgatcctgctctgctcagtggctgggggtacaggaaatgtcacattctcctggtacagagaggccacaggaaccagtatgggaaagaaaacccagcgttccctgtcagcagagctggagatcccagctgtgaaagagagtgatgccggcaaatattactgtagagctgacaacggccatgtgcctatccagagcaaggtggtgaatatccctgtgagaattccagtgtctcgccctgtcctcaccctcaggtctcctggggcccaggctgcagtgggggacctgctggagcttcactgtgaggccctgagaggctctcccccaatcttgtaccaattttatcatgaggatgtcacccttgggaacagctcggccccctctggaggaggggcctccttcaacctctctttgactgcagaacattctggaaactactcctgtgaggccaacaacggcctgggggcccagtgcagtgaggcagtgccagtctccatctcaggacctgatggctatagaagagacctcatgacagctggagttctctggggactgtttggtgtccttggtttcactggtgttgctttgctgttgtatgccttgttccacaagatatcaggttgtatctaccatttggattctccatattttgctatgacctttccactactgata

SEQ ID NO: 11028 - DNA, 1311 bp, Homo sapiens
  misc_feature (85)...(85): n = g, a, c or t
gacactcaacttcacagtgcctactggggccagaagcaatcatcttacctcaggagtcattgaggggctgctcagcacccttggnccagccaccgtggccttattattttgctacggcctcaaaagaaaaataggaagacgttcagccagggatccactcaggagccttcccagccctctaccccaagagttcacctacctcaactcacctaccccagggcagctacagcctatatatgaaaatgtgaatgttgtaagtggggatgaggtttattcactggcgtactataaccagccggagcaggaatcagtagcagcagaaaccctggggacacatatggaggacaagatgcagtcactgaacaggcagattcgctgacccttgtggcgccctcttctgtcttcgaaggagacagcatcgttctgaaatgccagggagaacagaactggaaaattcagaagatggcttaccataaggataacaaagagttatctgttttcaaaaaattctcagatttccttatccaaagtgcagttttaagtgacagtggtaactatttctgtagtaccaaaggacaactctttctctgggataaaacttcaaatatagtaaagataaaagtccaaggaatccccatctctaatgtaagcttggagatccgggcccccgggggacaggtgactgaaggacaaaaactgatcctgctctgctcagtggctgggggtacaggaaatgtcacattctcctggtacagagaggccacaggaaccagtatgggaaagaaaacccagcgttccctgtcagcagagctggagatcccagctgtgaaagagagtgatgccggcaaatattactgtagagctgacaacggccatgtgcctatccagagcaaggtggtgaatatccctgtgagaagacctgatggctatagaagagacctcatgacagctggagttctctggggactgtttggtgtccttggtttcactggtgttgctttgctgttgtatgccttgttccacaagatatcaggttgtatctaccatttggattctccatattttgctatgacctttccactactgatatagattgaaattacaaaaaaagaagagagaaaagaaaactctccaaaagccaataatttctttttatgcttcataattctgcaaggctctgtgcaatgctcaatgtggtcatactgctaattatacaatatgtcactgttccctgtgcatagtcactggagattaaattatttacacattctttcaaaaaaaaaaaaaaaaaaaaaaaaaaaaaaaaaaaaa

SEQ ID NO: 11029 - DNA, 627 bp, Homo sapiens
atggcttaccataaggataacaaagagttatctgttttcaaaaaattctcagatttccttatccaaagtgcagttttaagtgacagtggtaactatttctgtagtaccaaaggacaactctttctctgggataaaacttcaaatatagtaaagataaaagtccaaggaatccccatctctaatgtaagcttggagatccgggcccccgggggacaggtgactgaaggacaaaaactgatcctgctctgctcagtggctgggggtacaggaaatgtcacattctcctggtacagagaggccacaggaaccagtatgggaaagaaaacccagcgttccctgtcagcagagctggagatcccagctgtgaaagagagtgatgccggcaaatattactgtagagctgacaacggccatgtgcctatccagagcaaggtggtgaatatccctgtgagaagacctgatggctatagaagagacctcatgacagctggagttctctggggactgtttggtgtccttggtttcactggtgttgctttgctgttgtatgccttgttccacaagatatcaggttgtatctaccatttggattctccatattttgctatgacctttccactactgata

SEQ ID NO: 11030 - DNA, 1596 bp, Homo sapiens
  misc_feature (85)...(85): n = g, a, c or t
gacactcaacttcacagtgcctactggggccagaagcaatcatcttacctcaggagtcattgaggggctgctcagcacccttggnccagccaccgtggccttattattttgctacggcctcaaaagaaaaataggaagacgttcagccagggatccactcaggagccttcccagccctctaccccaagagttcacctacctcaactcacctaccccagggcagctacagcctatatatgaaaatgtgaatgttgtaagtggggatgaggtttattcactggcgtactataaccagccggagcaggaatcagtagcagcagaaaccctggggacacatatggaggacaagatgcagtcactgaacaggcagattcgctgacccttgtggcgccctcttctgtcttcgaaggagacagcatcgttctgaaatgccagggagaacagaactggaaaattcagaagatggcttaccataaggataacaaagagttatctgttttcaaaaaattctcagatttccttatccaaagtgcagttttaagtgacagtggtaactatttctgtagtaccaaaggacaactctttctctgggataaaacttcaaatatagtaaagataaaagtccaagagctctttcaacgtcctgtgctgactgccagctccttccagcccatcgaagggggtccagtgagcctgaaatgtgagacccggctctctccacagaggttggatgttcaactccagttctgcttcttcagagaaaaccaggtcctggggtcaggctggagcagctctccggagctccagatttctgccgtgtggagtgaagacacagggtcttactggtgcaaggcagaaacggtgactcacaggatcagaaaacagagcctccaatcccagattcacgtgcagagaatccccatctctaatgtaagcttggagatccgggcccccgggggacaggtgactgaaggacaaaaactgatcctgctctgctcagtggctgggggtacaggaaatgtcacattctcctggtacagagaggccacaggaaccagtatgggaaagaaaacccagcgttccctgtcagcagagctggagatcccagctgtgaaagagagtgatgccggcaaatattactgtagagctgacaacggccatgtgcctatccagagcaaggtggtgaatatccctgtgagaagacctgatggctatagaagagacctcatgacagctggagttctctggggactgtttggtgtccttggtttcactggtgttgctttgctgttgtatgccttgttccacaagatatcaggttgtatctaccatttggattctccatattttgctatgacctttccactactgatatagattgaaattacaaaaaaagaagagagaaaagaaaactctccaaaagccaataatttctttttatgcttcataattctgcaaggctctgtgcaatgctcaatgtggtcatactgctaattatacaatatgtcactgttccctgtgcatagtcactggagattaaattatttacacattctttcaaaaaaaaaaaaaaaaaaaaaaaaaaaaaaaaaaaaa

SEQ ID NO: 11031 - DNA, 912 bp, Homo sapiens
atggcttaccataaggataacaaagagttatctgttttcaaaaaattctcagatttccttatccaaagtgcagttttaagtgacagtggtaactatttctgtagtaccaaaggacaactctttctctgggataaaacttcaaatatagtaaagataaaagtccaagagctctttcaacgtcctgtgctgactgccagctccttccagcccatcgaagggggtccagtgagcctgaaatgtgagacccggctctctccacagaggttggatgttcaactccagttctgcttcttcagagaaaaccaggtcctggggtcaggctggagcagctctccggagctccagatttctgccgtgtggagtgaagacacagggtcttactggtgcaaggcagaaacggtgactcacaggatcagaaaacagagcctccaatcccagattcacgtgcagagaatccccatctctaatgtaagcttggagatccgggcccccgggggacaggtgactgaaggacaaaaactgatcctgctctgctcagtggctgggggtacaggaaatgtcacattctcctggtacagagaggccacaggaaccagtatgggaaagaaaacccagcgttccctgtcagcagagctggagatcccagctgtgaaagagagtgatgccggcaaatattactgtagagctgacaacggccatgtgcctatccagagcaaggtggtgaatatccctgtgagaagacctgatggctatagaagagacctcatgacagctggagttctctggggactgtttggtgtccttggtttcactggtgttgctttgctgttgtatgccttgttccacaagatatcaggttgtatctaccatttggattctccatattttgctatgacctttccactactgata

SEQ ID NO: 11032 - DNA, 2392 bp, Homo sapiens
tggtgaccaagagtacatctcttttcaaatagctggattaggtcctcatgctgctgtggtcattgctggtcatctttgatgcagtcactgaacaggcagattcgctgacccttgtggcgccctcttctgtcttcgaaggagacagcatcgttctgaaatgccagggagaacagaactggaaaattcagaagatggcttaccataaggataacaaagagttatctgttttcaaaaaattctcagatttccttatccaaagtgcagttttaagtgacagtggtaactatttctgtagtaccaaaggacaactctttctctgggataaaacttcaaatatagtaaagataaaagtccaagagctctttcaacgtcctgtgctgactgccagctccttccagcccatcgaagggggtccagtgagcctgaaatgtgagacccggctctctccacagaggaatccccatctctaatgtaagcttggagatccgggcccccgggggacaggtgactgaaggacaaaaactgatcctgctctgctcagtggctgggggtacaggaaatgtcacattctcctggtacagagaggccacaggaaccagtatgggaaagaaaacccagcgttccctgtcagcagagctggagatcccagctgtgaaagagagtgatgccggcaaatattactgtagagctgacaacggccatgtgcctatccagagcaaggtggtgaatatccctgtgagaattccagtgtctcgccctgtcctcaccctcaggtctcctggggcccaggctgcagtgggggacctgctggagcttcactgtgaggccctgagaggctctcccccaatcttgtaccaattttatcatgaggatgtcacccttgggaacagctcggccccctctggaggaggggcctccttcaacctctctttgactgcagaacattctggaaactactcctgtgaggccaacaacggcctgggggcccagtgcagtgaggcagtgccagtctccatctcaggacctgatggctatagaagagacctcatgacagctggagttctctggggactgtttggtgtccttggtttcactggtgttgctttgctgttgtatgccttgttccacaagatatcaggagaaagttctgccactaatgaacccagaggggcttccaggccaaatcctcaagagttcacctattcaagcccaaccccagacatggaggagctgcagccagtgtatgtcaatgtgggctctgtagatgtggatgtggtttattctcaggtctggagcatgcagcagccagaaagctcagcaaacatcaggacacttctggagaacaaggactcccaagtcatctactcttctgtgaagaaatcataacacttggaggaatcagaagggaagatcaacagcaaggatggggcatcattaagacttgctataaaaccttatgaaaatgcttgaggcttatcacctgccacagccagaacgtgcctcaggaggcacctcctgtcatttttgtcctgatgatgtttcttctccaatatcttcttttacctatcaatattcattgaactgctgctacatccagacactgtgcaaataaattatttctgctaccttctcttaagcaatcagtgtgtaaagatttgagggaagaatgaataagagatacaaggtctcaccttcatctactgtgaagtgatgagaacaggacttgatagtggtgtattaacttatttatgtgctgctggatacagtttgctaatattttgttgagaatttttgcaaatatgttcattgggaatattggcctgaaattttcttttccactgtgtctctgccagaatgtttgtatcaggctgatgctggcttcatagaatgagttaggcaggagcccttcctccttgattttttggcatagtttcagcaggattggtaccagttattctttctgcatcttgtagaattcagctatgaatccatctggtctagggcttttgtgttggttggtaagttttttattactaattcaacttcagcgcttgatattggtctaggaggggtttctgtctcttcctggttcaatcttgggagattgtgtgtttccaggaatttagccgtttcctccagattttcttctttatgtgcatcgacttgagtgtaaacataacttatatgcactgggaaaccaaaaaatctgtgtgacttgctttattgcagcatttgttttattttggtagtctggaactgaacctgcaatatcaccaaagtatgcatatagttgcaaaaatgtgatttttgacatagtaaatatgagtatttgcaataaactatgatattacttttgtaagtatatagaataaaatgtaaataatctataaaa

SEQ ID NO: 11033 - DNA, 420 bp, Homo sapiens
atgctgctgtggtcattgctggtcatctttgatgcagtcactgaacaggcagattcgctgacccttgtggcgccctcttctgtcttcgaaggagacagcatcgttctgaaatgccagggagaacagaactggaaaattcagaagatggcttaccataaggataacaaagagttatctgttttcaaaaaattctcagatttccttatccaaagtgcagttttaagtgacagtggtaactatttctgtagtaccaaaggacaactctttctctgggataaaacttcaaatatagtaaagataaaagtccaagagctctttcaacgtcctgtgctgactgccagctccttccagcccatcgaagggggtccagtgagcctgaaatgtgagacccggctctctccacagaggaatccccatctc

SEQ ID NO: 11034 - DNA, 783 bp, Homo sapiens
atgggaaagaaaacccagcgttccctgtcagcagagctggagatcccagctgtgaaagagagtgatgccggcaaatattactgtagagctgacaacggccatgtgcctatccagagcaaggtggtgaatatccctgtgagaattccagtgtctcgccctgtcctcaccctcaggtctcctggggcccaggctgcagtgggggacctgctggagcttcactgtgaggccctgagaggctctcccccaatcttgtaccaattttatcatgaggatgtcacccttgggaacagctcggccccctctggaggaggggcctccttcaacctctctttgactgcagaacattctggaaactactcctgtgaggccaacaacggcctgggggcccagtgcagtgaggcagtgccagtctccatctcaggacctgatggctatagaagagacctcatgacagctggagttctctggggactgtttggtgtccttggtttcactggtgttgctttgctgttgtatgccttgttccacaagatatcaggagaaagttctgccactaatgaacccagaggggcttccaggccaaatcctcaagagttcacctattcaagcccaaccccagacatggaggagctgcagccagtgtatgtcaatgtgggctctgtagatgtggatgtggtttattctcaggtctggagcatgcagcagccagaaagctcagcaaacatcaggacacttctggagaacaaggactcccaagtcatctactcttctgtgaagaaatca

SEQ ID NO: 11035 - DNA, 2077 bp, Homo sapiens
ccacgcgtccggtcctgaactgggctgaataaacatacctaaatatatgtttagaaatgctcctatgtatcagttttcccaggaacaactataatattatagaaatcttaaaattatttcctaataaaaaattataggatacaaaagaaaaaaaagaaatatgaagagggctggatgggcacaggaaaacaatcagatgagaacaacagatgaccgtgtctgcaggcagcacccagaactgatattcccctcaaacgtctaaatatattgttgagaaaattatctctaactgttctagtgggaatgtgggaatggaaaatatgcaacagccatggggccaggccctttgctgagcctgcaggttgggagtttgtgaatctattgaggcatcacaaatcttttctgatagcccctctgtgtctgtcagttccagtgtctcgccctgtcctcaccctcaggtctcctggggcccaggctgcagtgggggacctgctggagcttcactgtgaggccctgagaggctctcccccaatcttgtaccaattttatcatgaggatgtcacccttgggaacagctcggccccctctggaggaggggcctccttcaacctctctttgactgcagaacattctggaaactactcctgtgaggccaacaacggcctgggggcccagtgcagtgaggcagtgccagtctccatctcaggacctgatggctatagaagagacctcatgacagctggagttctctggggactgtttggtgtccttggtttcactggtgttgctttgctgttgtatgccttgttccacaagatatcaggagaaagttctgccactaatgaacccagaggggcttccaggccaaatcctcaagagttcacctattcaagcccaaccccagacatggaggagctgcagccagtgtatgtcaatgtgggctctgtagatgtggatgtggtttattctcaggtctggagcatgcagcagccagaaagctcagcaaacatcaggacacttctggagaacaaggactcccaagtcatctactcttctgtgaagaaatcataacacttggaggaatcagaagggaagatcaacagcaaggatggggcatcattaagacttgctataaaaccttatgaaaatgcttgaggcttatcacctgccacagccagaacgtgcctcaggaggcacctcctgtcatttttgtcctgatgatgtttcttctccaatatcttcttttacctatcaatattcattgaactgctgctacatccagacactgtgcaaataaattatttctgctaccttctcttaagcaatcagtgtgtaaagatttgagggaagaatgaataagagatacaaggtctcaccttcatctactgtgaagtgatgagaacaggacttgatagtggtgtattaacttatttatgtgctgctggatacagtttgctaatattttgttgagaatttttgcaaatatgttcattgggaatattggcctgaaattttcttttccactgtgtctctgccagaatgtttgtatcaggctgatgctggcttcatagaatgagttaggcaggagcccttcctccttgattttttggcatagtttcagcaggattggtaccagttattctttctgcatcttgtagaattcagctatgaatccatctggtctagggcttttgtgttggttggtaagttttttattactaattcaacttcagcgcttgatattggtctaggaggggtttctgtctcttcctggttcaatcttgggagattgtgtgtttccaggaatttagccgtttcctccagattttcttctttatgtgcatcgacttgagtgtaaacataacttatatgcactgggaaaccaaaaaatctgtgtgacttgctttattgcagcatttgttttattttggtagtctggaactgaacctgcaatatcaccaaagtatgcatatagttgcaaaaatgtgatttttgacatagtaaatatgagtatttgcaataaactatgatattacttttgtaagtatatagaataaaatgtaaataatctataaaa

SEQ ID NO: 11036 - DNA, 765 bp, Homo sapiens
atgtgggaatggaaaatatgcaacagccatggggccaggccctttgctgagcctgcaggttgggagtttgtgaatctattgaggcatcacaaatcttttctgatagcccctctgtgtctgtcagttccagtgtctcgccctgtcctcaccctcaggtctcctggggcccaggctgcagtgggggacctgctggagcttcactgtgaggccctgagaggctctcccccaatcttgtaccaattttatcatgaggatgtcacccttgggaacagctcggccccctctggaggaggggcctccttcaacctctctttgactgcagaacattctggaaactactcctgtgaggccaacaacggcctgggggcccagtgcagtgaggcagtgccagtctccatctcaggacctgatggctatagaagagacctcatgacagctggagttctctggggactgtttggtgtccttggtttcactggtgttgctttgctgttgtatgccttgttccacaagatatcaggagaaagttctgccactaatgaacccagaggggcttccaggccaaatcctcaagagttcacctattcaagcccaaccccagacatggaggagctgcagccagtgtatgtcaatgtgggctctgtagatgtggatgtggtttattctcaggtctggagcatgcagcagccagaaagctcagcaaacatcaggacacttctggagaacaaggactcccaagtcatctactcttctgtgaagaaatca

SEQ ID NO: 11037 - DNA, 1101 bp, Homo sapiens
ccacgcgtccggtcctgaactgggctgaataaacatacctaaatatatgtttagaaatgctcctatgtatcagttttcccaggaacaactataatattatagaaatcttaaaattatttcctaataaaaaattataggatacaaaagaaaaaaaagaaatatgaagagggctggatgggcacaggaaaacaatcagatgagaacaacagatgaccgtgtctgcaggcagcacccagaactgatattcccctcaaacgtctaaatatattgttgagaaaattatctctaactgttctagtgggaatgtgggaatggaaaatatgcaacagccatggggccaggccctttgctgagcctgcaggttgggagtttgtgaatctattgaggcatcacaaatcttttctgatagcccctctgtgtctgtcagttccagtgtctcgccctgtcctcaccctcaggtctcctggggcccaggctgcagtgggggacctgctggagcttcactgtgaggccctgagaggctctcccccaatcttgtaccaattttatcatgaggatgtcacccttgggaacagctcggccccctctggaggaggggcctccttcaacctctctttgactgcagaacattctggaaactactcctgtgaggccaacaacggcctgggggcccagtgcagtgaggcagtgccagtctccatctcaggacctgatggctatagaagagacctcatgacagctggagttctctggggactgtttggtgtccttggtttcactggtgttgctttgctgttgtatgccttgttccacaagatatcaggttgtatctaccatttggattctccatattttgctatgacctttccactactgatatagattgaaattacaaaaaaagaagagagaaaagaaaactctccaaaagccaataatttctttttatgcttcataattctgcaaggctctgtgcaatgctcaatgtggtcatactgctaattatacaatatgtcactgttccctgtgcatagtcactggagattaaattatttacacattctttcaaaaaaaaaaaaaaaaaaaaaaaaaaaaaaaaaaaaa

SEQ ID NO: 11038 - DNA, 576 bp, Homo sapiens
atgtgggaatggaaaatatgcaacagccatggggccaggccctttgctgagcctgcaggttgggagtttgtgaatctattgaggcatcacaaatcttttctgatagcccctctgtgtctgtcagttccagtgtctcgccctgtcctcaccctcaggtctcctggggcccaggctgcagtgggggacctgctggagcttcactgtgaggccctgagaggctctcccccaatcttgtaccaattttatcatgaggatgtcacccttgggaacagctcggccccctctggaggaggggcctccttcaacctctctttgactgcagaacattctggaaactactcctgtgaggccaacaacggcctgggggcccagtgcagtgaggcagtgccagtctccatctcaggacctgatggctatagaagagacctcatgacagctggagttctctggggactgtttggtgtccttggtttcactggtgttgctttgctgttgtatgccttgttccacaagatatcaggttgtatctaccatttggattctccatattttgctatgacctttccactactgata

SEQ ID NO: 11039 - protein, 508 aa, Homo sapiens; identical to SEQ ID NO: 10464

SEQ ID NO: 11040 - protein, 413 aa, Homo sapiens
MLLWSLLVIFDAVTEQADSLTLVAPSSVFEGDSIVLKCQGEQNWKIQKMAYHKDNKELSVFKKFSDFLIQSAVLSDSGNYFCSTKGQLFLWDKTSNIVKIKVQGIPISNVSLEIRAPGGQVTEGQKLILLCSVAGGTGNVTFSWYREATGTSMGKKTQRSLSAELEIPAVKESDAGKYYCRADNGHVPIQSKVVNIPVRIPVSRPVLTLRSPGAQAAVGDLLELHCEALRGSPPILYQFYHEDVTLGNSSAPSGGGASFNLSLTAEHSGNYSCEANNGLGAQCSEAVPVSISGPDGYRRDLMTAGVLWGLFGVLGFTGVALLLYALFHKISGESSATNEPRGASRPNPQEFTYSSPTPDMEELQPVYVNVGSVDVDVVYSQVWSMQQPESSANIRTLLENKDSQVIYSSVKKS

SEQ ID NO: 11041 - protein, 415 aa, Homo sapiens
MLLWSLLVIFDAVTEQADSLTLVAPSSVFEGDSIVLKCQGEQNWKIQKMAYHKDNKELSVFKKFSDFLIQSAVLSDSGNYFCSTKGQLFLWDKTSNIVKIKVQELFQRPVLTASSFQPIEGGPVSLKCETRLSPQRLDVQLQFCFFRENQVLGSGWSSSPELQISAVWSEDTGSYWCKAETVTHRIRKQSLQSQIHVQRIPISNVSLEIRAPGGQVTEGQKLILLCSVAGGTGNVTFSWYREATGTSMGKKTQRSLSAELEIPAVKESDAGKYYCRADNGHVPIQSKVVNIPVRRPDGYRRDLMTAGVLWGLFGVLGFTGVALLLYALFHKISGESSATNEPRGASRPNPQEFTYSSPTPDMEELQPVYVNVGSVDVDVVYSQVWSMQQPESSANIRTLLENKDSQVIYSSVKKS

SEQ ID NO: 11042 - protein, 320 aa, Homo sapiens
MLLWSLLVIFDAVTEQADSLTLVAPSSVFEGDSIVLKCQGEQNWKIQKMAYHKDNKELSVFKKFSDFLIQSAVLSDSGNYFCSTKGQLFLWDKTSNIVKIKVQGIPISNVSLEIRAPGGQVTEGQKLILLCSVAGGTGNVTFSWYREATGTSMGKKTQRSLSAELEIPAVKESDAGKYYCRADNGHVPIQSKVVNIPVRRPDGYRRDLMTAGVLWGLFGVLGFTGVALLLYALFHKISGESSATNEPRGASRPNPQEFTYSSPTPDMEELQPVYVNVGSVDVDVVYSQVWSMQQPESSANIRTLLENKDSQVIYSSVKKS

SEQ ID NO: 11043 - protein, 445 aa, Homo sapiens
MLLWSLLVIFDAVTEQADSLTLVAPSSVFEGDSIVLKCQGEQNWKIQKMAYHKDNKELSVFKKFSDFLIQSAVLSDSGNYFCSTKGQLFLWDKTSNIVKIKVQELFQRPVLTASSFQPIEGGPVSLKCETRLSPQRLDVQLQFCFFRENQVLGSGWSSSPELQISAVWSEDTGSYWCKAETVTHRIRKQSLQSQIHVQRIPISNVSLEIRAPGGQVTEGQKLILLCSVAGGTGNVTFSWYREATGTSMGKKTQRSLSAELEIPAVKESDAGKYYCRADNGHVPIQSKVVNIPVRIPVSRPVLTLRSPGAQAAVGDLLELHCEALRGSPPILYQFYHEDVTLGNSSAPSGGGASFNLSLTAEHSGNYSCEANNGLGAQCSEAVPVSISGPDGYRRDLMTAGVLWGLFGVLGFTGVALLLYALFHKISGCIYHLDSPYFAMTFPLLI

SEQ ID NO: 11044 - protein, 350 aa, Homo sapiens
MLLWSLLVIFDAVTEQADSLTLVAPSSVFEGDSIVLKCQGEQNWKIQKMAYHKDNKELSVFKKFSDFLIQSAVLSDSGNYFCSTKGQLFLWDKTSNIVKIKVQGIPISNVSLEIRAPGGQVTEGQKLILLCSVAGGTGNVTFSWYREATGTSMGKKTQRSLSAELEIPAVKESDAGKYYCRADNGHVPIQSKVVNIPVRIPVSRPVLTLRSPGAQAAVGDLLELHCEALRGSPPILYQFYHEDVTLGNSSAPSGGGASFNLSLTAEHSGNYSCEANNGLGAQCSEAVPVSISGPDGYRRDLMTAGVLWGLFGVLGFTGVALLLYALFHKISGCIYHLDSPYFAMTFPLLI

SEQ ID NO: 11045 - protein, 352 aa, Homo sapiens
MLLWSLLVIFDAVTEQADSLTLVAPSSVFEGDSIVLKCQGEQNWKIQKMAYHKDNKELSVFKKFSDFLIQSAVLSDSGNYFCSTKGQLFLWDKTSNIVKIKVQELFQRPVLTASSFQPIEGGPVSLKCETRLSPQRLDVQLQFCFFRENQVLGSGWSSSPELQISAVWSEDTGSYWCKAETVTHRIRKQSLQSQIHVQRIPISNVSLEIRAPGGQVTEGQKLILLCSVAGGTGNVTFSWYREATGTSMGKKTQRSLSAELEIPAVKESDAGKYYCRADNGHVPIQSKVVNIPVRRPDGYRRDLMTAGVLWGLFGVLGFTGVALLLYALFHKISGCIYHLDSPYFAMTFPLLI

SEQ ID NO: 11046 - protein, 257 aa, Homo sapiens
MLLWSLLVIFDAVTEQADSLTLVAPSSVFEGDSIVLKCQGEQNWKIQKMAYHKDNKELSVFKKFSDFLIQSAVLSDSGNYFCSTKGQLFLWDKTSNIVKIKVQGIPISNVSLEIRAPGGQVTEGQKLILLCSVAGGTGNVTFSWYREATGTSMGKKTQRSLSAELEIPAVKESDAGKYYCRADNGHVPIQSKVVNIPVRRPDGYRRDLMTAGVLWGLFGVLGFTGVALLLYALFHKISGCIYHLDSPYFAMTFPLLI

SEQ ID NO: 11047 - protein, 365 aa, Homo sapiens
MAYHKDNKELSVFKKFSDFLIQSAVLSDSGNYFCSTKGQLFLWDKTSNIVKIKVQGIPISNVSLEIRAPGGQVTEGQKLILLCSVAGGTGNVTFSWYREATGTSMGKKTQRSLSAELEIPAVKESDAGKYYCRADNGHVPIQSKVVNIPVRIPVSRPVLTLRSPGAQAAVGDLLELHCEALRGSPPILYQFYHEDVTLGNSSAPSGGGASFNLSLTAEHSGNYSCEANNGLGAQCSEAVPVSISGPDGYRRDLMTAGVLWGLFGVLGFTGVALLLYALFHKISGESSATNEPRGASRPNPQEFTYSSPTPDMEELQPVYVNVGSVDVDVVYSQVWSMQQPESSANIRTLLENKDSQVIYSSVKKS

SEQ ID NO: 11048 - protein, 460 aa, Homo sapiens
MAYHKDNKELSVFKKFSDFLIQSAVLSDSGNYFCSTKGQLFLWDKTSNIVKIKVQELFQRPVLTASSFQPIEGGPVSLKCETRLSPQRLDVQLQFCFFRENQVLGSGWSSSPELQISAVWSEDTGSYWCKAETVTHRIRKQSLQSQIHVQRIPISNVSLEIRAPGGQVTEGQKLILLCSVAGGTGNVTFSWYREATGTSMGKKTQRSLSAELEIPAVKESDAGKYYCRADNGHVPIQSKVVNIPVRIPVSRPVLTLRSPGAQAAVGDLLELHCEALRGSPPILYQFYHEDVTLGNSSAPSGGGASFNLSLTAEHSGNYSCEANNGLGAQCSEAVPVSISGPDGYRRDLMTAGVLWGLFGVLGFTGVALLLYALFHKISGESSATNEPRGASRPNPQEFTYSSPTPDMEELQPVYVNVGSVDVDVVYSQVWSMQQPESSANIRTLLENKDSQVIYSSVKKS

SEQ ID NO: 11049 - protein, 272 aa, Homo sapiens
MAYHKDNKELSVFKKFSDFLIQSAVLSDSGNYFCSTKGQLFLWDKTSNIVKIKVQGIPISNVSLEIRAPGGQVTEGQKLILLCSVAGGTGNVTFSWYREATGTSMGKKTQRSLSAELEIPAVKESDAGKYYCRADNGHVPIQSKVVNIPVRRPDGYRRDLMTAGVLWGLFGVLGFTGVALLLYALFHKISGESSATNEPRGASRPNPQEFTYSSPTPDMEELQPVYVNVGSVDVDVVYSQVWSMQQPESSANIRTLLENKDSQVIYSSVKKS

SEQ ID NO: 11050 - protein, 367 aa, Homo sapiens
MAYHKDNKELSVFKKFSDFLIQSAVLSDSGNYFCSTKGQLFLWDKTSNIVKIKVQELFQRPVLTASSFQPIEGGPVSLKCETRLSPQRLDVQLQFCFFRENQVLGSGWSSSPELQISAVWSEDTGSYWCKAETVTHRIRKQSLQSQIHVQRIPISNVSLEIRAPGGQVTEGQKLILLCSVAGGTGNVTFSWYREATGTSMGKKTQRSLSAELEIPAVKESDAGKYYCRADNGHVPIQSKVVNIPVRRPDGYRRDLMTAGVLWGLFGVLGFTGVALLLYALFHKISGESSATNEPRGASRPNPQEFTYSSPTPDMEELQPVYVNVGSVDVDVVYSQVWSMQQPESSANIRTLLENKDSQVIYSSVKKS

SEQ ID NO: 11051 - protein, 302 aa, Homo sapiens
MAYHKDNKELSVFKKFSDFLIQSAVLSDSGNYFCSTKGQLFLWDKTSNIVKIKVQGIPISNVSLEIRAPGGQVTEGQKLILLCSVAGGTGNVTFSWYREATGTSMGKKTQRSLSAELEIPAVKESDAGKYYCRADNGHVPIQSKVVNIPVRIPVSRPVLTLRSPGAQAAVGDLLELHCEALRGSPPILYQFYHEDVTLGNSSAPSGGGASFNLSLTAEHSGNYSCEANNGLGAQCSEAVPVSISGPDGYRRDLMTAGVLWGLFGVLGFTGVALLLYALFHKISGCIYHLDSPYFAMTFPLLI

SEQ ID NO: 11052 - protein, 397 aa, Homo sapiens
MAYHKDNKELSVFKKFSDFLIQSAVLSDSGNYFCSTKGQLFLWDKTSNIVKIKVQELFQRPVLTASSFQPIEGGPVSLKCETRLSPQRLDVQLQFCFFRENQVLGSGWSSSPELQISAVWSEDTGSYWCKAETVTHRIRKQSLQSQIHVQRIPISNVSLEIRAPGGQVTEGQKLILLCSVAGGTGNVTFSWYREATGTSMGKKTQRSLSAELEIPAVKESDAGKYYCRADNGHVPIQSKVVNIPVRIPVSRPVLTLRSPGAQAAVGDLLELHCEALRGSPPILYQFYHEDVTLGNSSAPSGGGASFNLSLTAEHSGNYSCEANNGLGAQCSEAVPVSISGPDGYRRDLMTAGVLWGLFGVLGFTGVALLLYALFHKISGCIYHLDSPYFAMTFPLLI

SEQ ID NO: 11053 - protein, 209 aa, Homo sapiens
MAYHKDNKELSVFKKFSDFLIQSAVLSDSGNYFCSTKGQLFLWDKTSNIVKIKVQGIPISNVSLEIRAPGGQVTEGQKLILLCSVAGGTGNVTFSWYREATGTSMGKKTQRSLSAELEIPAVKESDAGKYYCRADNGHVPIQSKVVNIPVRRPDGYRRDLMTAGVLWGLFGVLGFTGVALLLYALFHKISGCIYHLDSPYFAMTFPLLI

SEQ ID NO: 11054 - protein, 304 aa, Homo sapiens
MAYHKDNKELSVFKKFSDFLIQSAVLSDSGNYFCSTKGQLFLWDKTSNIVKIKVQELFQRPVLTASSFQPIEGGPVSLKCETRLSPQRLDVQLQFCFFRENQVLGSGWSSSPELQISAVWSEDTGSYWCKAETVTHRIRKQSLQSQIHVQRIPISNVSLEIRAPGGQVTEGQKLILLCSVAGGTGNVTFSWYREATGTSMGKKTQRSLSAELEIPAVKESDAGKYYCRADNGHVPIQSKVVNIPVRRPDGYRRDLMTAGVLWGLFGVLGFTGVALLLYALFHKISGCIYHLDSPYFAMTFPLLI

SEQ ID NO: 11055 - protein, 140 aa, Homo sapiens
MLLWSLLVIFDAVTEQADSLTLVAPSSVFEGDSIVLKCQGEQNWKIQKMAYHKDNKELSVFKKFSDFLIQSAVLSDSGNYFCSTKGQLFLWDKTSNIVKIKVQELFQRPVLTASSFQPIEGGPVSLKCETRLSPQRNPHL

SEQ ID NO: 11056 - protein, 261 aa, Homo sapiens; identical to SEQ ID NO: 9611

SEQ ID NO: 11057 - protein, 255 aa, Homo sapiens; identical to SEQ ID NO: 9612

SEQ ID NO: 11058 - protein, 192 aa, Homo sapiens
MWEWKICNSHGARPFAEPAGWEFVNLLRHHKSFLIAPLCLSVPVSRPVLTLRSPGAQAAVGDLLELHCEALRGSPPILYQFYHEDVTLGNSSAPSGGGASFNLSLTAEHSGNYSCEANNGLGAQCSEAVPVSISGPDGYRRDLMTAGVLWGLFGVLGFTGVALLLYALFHKISGCIYHLDSPYFAMTFPLLI

SEQ ID NO: 11059 - DNA, 21 bp, Artificial Sequence
  sense PCR primer
ctgctgtggtcattgctggtc

SEQ ID NO: 11060 - DNA, 27 bp, Artificial Sequence
  antisense PCR primer
gacactggaattctcacagggatattc

SEQ ID NO: 11061 - protein, 23 aa, Homo sapiens
SVHPPWTTFFKGERVTLTCNGFQ

SEQ ID NO: 11062 - protein, 23 aa, Homo sapiens
PRSNPVRLLFSSDSLILQAPYSV

SEQ ID NO: 11063 - protein, 29 aa, Homo sapiens
NDVFRSNFKIIKIQELFPHPELKATDSQP

SEQ ID NO: 11064 - protein, 21 aa, Homo sapiens
FFRDGEVILSDWSTYPELQLP

SEQ ID NO: 11065 - protein, 13 aa, Homo sapiens
GAETVRGNIHKHS

SEQ ID NO: 11066 - protein, 11 aa, Homo sapiens
IPVSGVLLETQ

SEQ ID NO: 11067 - protein, 23 aa, Homo sapiens
GDTTFSWHREDMQESLGRKTQRS

SEQ ID NO: 11068 - protein, 19 aa, Homo sapiens
AGATGGLLSALLLAVALLF

SEQ ID NO: 11069 - protein, 19 aa, Homo sapiens
ANTSRTLLEDKDVSVVYSE

SEQ ID NO: 11070 - protein, 16 aa, Homo sapiens
PPWTTFFKGERVTLTC

SEQ ID NO: 11071 - protein, 12 aa, Homo sapiens
RHYWGEKLTLTP

SEQ ID NO: 11072-11080 - skipped (9 entries)

SEQ ID NO: 11081 - protein, 19 aa, Homo sapiens
ILLVLAPVSGQFARTPRPI

SEQ ID NO: 11082 - protein, 28 aa, Homo sapiens
RFYSPQKTKWYHRYLGKEILRETPDNIL

SEQ ID NO: 11083 - protein, 28 aa, Homo sapiens
ILQAPLSVFEGDSVVLRCRAKAEVTLNN

SEQ ID NO: 11084 - protein, 28 aa, Homo sapiens
WCKAATMPHSVISDSPRSWIQVQIPASH

SEQ ID NO: 11085 - protein, 21 aa, Homo sapiens
KVTLHCETQEDSLRTLYRFYH

SEQ ID NO: 11086 - protein, 15 aa, Homo sapiens
SVRCERGASISFSLT

SEQ ID NO: 11087 - protein, 41 aa, Homo sapiens
GLGAKPSKAVSLSVTVPVSHPVLNLSSPEDLIFEGAKVTLH

SEQ ID NO: 11088 - protein, 26 aa, Homo sapiens
DAALERRSANSAGGVAISFSLTAEHS

SEQ ID NO: 11089 - protein, 32 aa, Homo sapiens
KAVSLSITVPVSHPVLTLSSAEALTFEGATVT

SEQ ID NO: 11090 - protein, 20 aa, Homo sapiens
VILLVLAPVSGQFARTPRPI

SEQ ID NO: 11091 - protein, 27 aa, Homo sapiens
PWTTVFQGERVTLTCKGFRFYSPQKTK

SEQ ID NO: 11092 - protein, 22 aa, Homo sapiens
WYHRYLGKEILRETPDNILEVQ

SEQ ID NO: 11093-11098 - skipped (6 entries)

SEQ ID NO: 11099 - protein, 29 aa, Homo sapiens
VILLVLAPVSGQFARTPRPIIFLQPPWTT

SEQ ID NO: 11100 - protein, 37 aa, Homo sapiens
RVTLTCKGFRFYSPQKTKWYHRYLGKEILRETPDNIL

SEQ ID NO: 11101 - protein, 28 aa, Homo sapiens
ILQAPLSVFEGDSVVLRCRAKAEVTLNN

SEQ ID NO: 11102 - protein, 40 aa, Homo sapiens
QITAMWSKDSGFYWCKAATMPHSVISDSPRSWIQVQIPAS

SEQ ID NO: 11103 - protein, 34 aa, Homo sapiens
SPEKALNFEGTKVTLHCETQEDSLRTLYRFYHEG

SEQ ID NO: 11104 - protein, 30 aa, Homo sapiens
RFYHEGVPLRHKSVRCERGASISFSLTTEN

SEQ ID NO: 11105 - protein, 43 aa, Homo sapiens
NGLGAKPSKAVSLSVTVPVSHPVLNLSSPEDLIFEGAKVTLHC

SEQ ID NO: 11106 - protein, 31 aa, Homo sapiens
EDAALERRSANSAGGVAISFSLTAEHSGNYY

SEQ ID NO: 11107 - protein, 33 aa, Homo sapiens
KAVSLSITVPVSHPVLTLSSAEALTFEGATVTL

SEQ ID NO: 11108 - protein, 31 aa, Homo sapiens
VILLVLAPVSGQFARTPRPIIFLQPPWTTVF

SEQ ID NO: 11109 - protein, 29 aa, Homo sapiens
IIFLQPPWTTVFQGERVTLTCKGFRFYSP

SEQ ID NO: 11110 - protein, 38 aa, Homo sapiens
TCKGFRFYSPQKTKWYHRYLGKEILRETPDNILEVQES

SEQ ID NO: 11111-11115 - skipped (5 entries)

SEQ ID NO: 11116 - protein, 31 aa, Homo sapiens; identical to SEQ ID NO: 11108

SEQ ID NO: 11117 - protein, 37 aa, Homo sapiens; identical to SEQ ID NO: 11100

SEQ ID NO: 11118 - protein, 29 aa, Homo sapiens
ILQAPLSVFEGDSVVLRCRAKAEVTLNNT

SEQ ID NO: 11119 - protein, 31 aa, Homo sapiens
WCKAATMPHSVISDSPRSWIQVQIPASHPVL

SEQ ID NO: 11120 - protein, 44 aa, Homo sapiens
KVTLHCETQEDSLRTLYRFYHEGVPLRHKSVRCERGASISFSLT

SEQ ID NO: 11121 - protein, 39 aa, Homo sapiens
GAKPSKAVSLSVTVPVSHPVLNLSSPEDLIFEGAKVTLH

SEQ ID NO: 11122 - protein, 28 aa, Homo sapiens
EDAALERRSANSAGGVAISFSLTAEHSG

SEQ ID NO: 11123 - protein, 32 aa, Homo sapiens; identical to SEQ ID NO: 11089

SEQ ID NO: 11124 - protein, 30 aa, Homo sapiens
VILLVLAPVSGQFARTPRPIIFLQPPWTTV

SEQ ID NO: 11125 - protein, 41 aa, Homo sapiens
ERVTLTCKGFRFYSPQKTKWYHRYLGKEILRETPDNILEVQ

SEQ ID NO: 11126-11130 - skipped (5 entries)

SEQ ID NO: 11131 - protein, 29 aa, Homo sapiens
LLLLILTPGREQSGVAPKAVLLLNPPWST

SEQ ID NO: 11132 - protein, 29 aa, Homo sapiens
VALICSSISHSLAQGDTYWYHDEKLLKIK

SEQ ID NO: 11133 - protein, 24 aa, Homo sapiens
HQKVYYKDGKQLPNSYNLEKITVN

SEQ ID NO: 11134 - protein, 27 aa, Homo sapiens
EVTSKPLNIQVQELFLHPVLRASSSTP

SEQ ID NO: 11135 - protein, 33 aa, Homo sapiens
GTVTFSWHKEGRVRSLGRKTQRSLLAELHVLTV

SEQ ID NO: 11136 - protein, 41 aa, Homo sapiens
NVHSPILSTWIRVTVRIPVSHPVLTFRAPRAHTVVGDLLEL

SEQ ID NO: 11137 - protein, 31 aa, Homo sapiens
VSLRVTVPVSRPVLTLRAPGAQAVVGDLLEL

SEQ ID NO: 11138 - protein, 30 aa, Homo sapiens
LTTEHSGNYSCEADNGLGAQHSKVVTLNVT

SEQ ID NO: 11139 - protein, 25 aa, Homo sapiens
GITGLVLSILVLAAAAALLHYARAR

SEQ ID NO: 11140 - protein, 39 aa, Homo sapiens
LLLILTPGREQSGVAPKAVLLLNPPWSTAFKGEKVALIC

SEQ ID NO: 11141 - protein, 31 aa, Homo sapiens
KVALICSSISHSLAQGDTYWYHDEKLLKIKH

SEQ ID NO: 11142-11147 - skipped (6 entries)

SEQ ID NO: 11148 - protein, 24 aa, Homo sapiens
IFDAVTEQADSLTLVAPSSVFEGD

SEQ ID NO: 11149 - protein, 28 aa, Homo sapiens
QKMAYHKDNKELSVFKKFSDFLIQSAVL

SEQ ID NO: 11150 - protein, 27 aa, Homo sapiens
TSNIVKIKVQELFQRPVLTASSFQPIE

SEQ ID NO: 11151 - protein, 34 aa, Homo sapiens
SGWSSSPELQISAVWSEDTGSYWCKAETVTHRIR

SEQ ID NO: 11152 - protein, 31 aa, Homo sapiens
YREATGTSMGKKTQRSLSAELEIPAVKESDA

SEQ ID NO: 11153 - protein, 42 aa, Homo sapiens
VLTLRSPGAQAAVGDLLELHCEALRGSPPILYQFYHEDVTLG

SEQ ID NO: 11154 - protein, 41 aa, Homo sapiens
FNLSLTAEHSGNYSCEANNGLGAQCSEAVPVSISGPDGYRR

SEQ ID NO: 11155 - protein, 38 aa, Homo sapiens; identical to SEQ ID NO: 10458

SEQ ID NO: 11156 - protein, 37 aa, Homo sapiens
VALLLYALFHKISGESSATNEPRGASRPNPQEFTYSS

SEQ ID NO: 11157 - protein, 27 aa, Homo sapiens
DVDVVYSQVWSMQQPESSANIRTLLEN

SEQ ID NO: 11158 - protein, 39 aa, Homo sapiens [sequence omitted]

SEQ ID NO: 11159 - protein, 23 aa, Homo sapiens
DAVTEQADSLTLVAPSSVFEGDS

SEQ ID NO: 11160 - protein, 35 aa, Homo sapiens
QKMAYHKDNKELSVFKKFSDFLIQSAVLSDSGNYT

SEQ ID NO: 11161-11165 - skipped (5 entries)

SEQ ID NO: 11166 - protein, 23 aa, Homo sapiens
YWCEAQTMASKVLRSRRSQINVH

SEQ ID NO: 11167 - protein, 35 aa, Homo sapiens
PSPSGLVSITVRIPVSRPILMLRAPRAQAAVEDVL

SEQ ID NO: 11168 - protein, 29 aa, Homo sapiens
ELHCEALRGSPPILYWFYHEDITLGSRSA

SEQ ID NO: 11169 - protein, 38 aa, Homo sapiens
EAVTLNFTVPTGARSNHLTSGVIEGLLSTLGPATVALL

SEQ ID NO: 11170 - protein, 40 aa, Homo sapiens
IGRRSARDPLRSLPSPLPQEFTYLNSPTPGQLQPIYENVN

SEQ ID NO: 11171 - protein, 29 aa, Homo sapiens
EVYSLAYYNQPEQESVAAETLGTHMEDKV

SEQ ID NO: 11172 - protein, 35 aa, Homo sapiens
ETLGTHMEDKVSLDIYSRLRKANITDVDYEDAMHQ

SEQ ID NO: 11173-11177 - skipped (5 entries)

SEQ ID NO: 11178 - DNA, 120 bp, Homo sapiens
accaaaggacaactctttctctgggataaaacttcaaatatagtaaagataaaagtccaaggaatccccatctctaatgtaagcttggagatccgggcccccgggggacaggtgactgaa

SEQ ID NO: 11179 - DNA, 90 bp, Homo sapiens
tttctctgggataaaacttcaaatatagtaaagataaaagtccaaggaatccccatctctaatgtaagcttggagatccgggcccccggg

SEQ ID NO: 11180 - DNA, 120 bp, Homo sapiens
tgtagagctgacaacggccatgtgcctatccagagcaaggtggtgaatatccctgtgagaagacctgatggctatagaagagacctcatgacagctggagttctctggggactgtttggt

SEQ ID NO: 11181 - DNA, 90 bp, Homo sapiens
ggccatgtgcctatccagagcaaggtggtgaatatccctgtgagaagacctgatggctatagaagagacctcatgacagctggagttctc

SEQ ID NO: 11182 - DNA, 114 bp, Homo sapiens
gtccttggtttcactggtgttgctttgctgttgtatgccttgttccacaagatatcaggttgtatctaccatttggattctccatattttgctatgacctttccactactgata

SEQ ID NO: 11183 - DNA, 90 bp, Homo sapiens
ggtgttgctttgctgttgtatgccttgttccacaagatatcaggttgtatctaccatttggattctccatattttgctatgacctttcca

SEQ ID NO: 11184 - DNA, 72 bp, Homo sapiens
cagcccatcgaagggggtccagtgagcctgaaatgtgagacccggctctctccacagaggaatccccatctc

SEQ ID NO: 11185 - DNA, 57 bp, Homo sapiens
ggtccagtgagcctgaaatgtgagacccggctctctccacagaggaatccccatctc

SEQ ID NO: 11186 - protein, 40 aa, Homo sapiens
TKGQLFLWDKTSNIVKIKVQGIPISNVSLEIRAPGGQVTE

SEQ ID NO: 11187 - protein, 30 aa, Homo sapiens
FLWDKTSNIVKIKVQGIPISNVSLEIRAPG

SEQ ID NO: 11188 - protein, 40 aa, Homo sapiens
CRADNGHVPIQSKVVNIPVRRPDGYRRDLMTAGVLWGLFG

SEQ ID NO: 11189 - protein, 30 aa, Homo sapiens
GHVPIQSKVVNIPVRRPDGYRRDLMTAGVL

SEQ ID NO: 11190 - protein, 38 aa, Homo sapiens
VLGFTGVALLLYALFHKISGCIYHLDSPYFAMTFPLLI

SEQ ID NO: 11191 - protein, 30 aa, Homo sapiens
GVALLLYALFHKISGCIYHLDSPYFAMTFP

SEQ ID NO: 11192 - protein, 24 aa, Homo sapiens
QPIEGGPVSLKCETRLSPQRNPHL

SEQ ID NO: 11193 - protein, 19 aa, Homo sapiens
GPVSLKCETRLSPQRNPHL

SEQ ID NO: 11194 - DNA, 19 bp, Artificial Sequence
  forward IRTA1 primer
gtctgctccgtggctgaag

SEQ ID NO: 11195 - DNA, 21 bp, Artificial Sequence
  reverse IRTA1 primer
cagggaacgctgagttttcct

SEQ ID NO: 11196 - DNA, 19 bp, Artificial Sequence
  forward IRTA 2a primer
gtggcatcccagcacactt

SEQ ID NO: 11197 - DNA, 22 bp, Artificial Sequence
  reverse IRTA 2a primer
cctggaaccataccacaaagga

SEQ ID NO: 11198 - DNA, 23 bp, Artificial Sequence
  forward IRTA 2b primer
tccagtttcctcccctaatcaac

SEQ ID NO: 11199 - DNA, 24 bp, Artificial Sequence
  reverse IRTA 2b primer
agtacggaaaaccccagctagtta

SEQ ID NO: 11200 - DNA, 23 bp, Artificial Sequence
  forward primer amplifying portion of exon 11 contained in Ly1448P splice variants a-p and q2
atcccagctgtgaaagagagtga

SEQ ID NO: 11201 - DNA, 20 bp, Artificial Sequence
  reverse primer amplifying portion of exon 11 contained in Ly1448P splice variants a-p and q2
tgctctggataggcacatgg

SEQ ID NO: 11202 - DNA, 24 bp, Artificial Sequence
  forward primer amplifying portion of exon 12 contained in Ly1448P splice variants r and s
atgtgggaatggaaaatatgcaac

SEQ ID NO: 11203 - DNA, 25 bp, Artificial Sequence
  reverse primer amplifying portion of exon 12 contained in Ly1448P splice variants r and s
ggctatcagaaaagatttgtgatgc

SEQ ID NO: 11204 - DNA, 18 bp, Artificial Sequence
  forward IRTA5 primer
cagccaccgtggccttat

SEQ ID NO: 11205 - DNA, 20 bp, Artificial Sequence
  reverse IRTA5 primer
gagtggatccctggctgaac

SEQ ID NO: 11206 - DNA, 429 bp, Homo sapiens
ccacgcgtccggtcctgaactgggctgaataaacatacctaaatatatgtttagaaatgctcctatgtatcagttttcccaggaacaactataatattatagaaatcttaaaattatttcctaataaaaaattataggatacaaaagaaaaaaaagaaatatgaagagggctggatgggcacaggaaaacaatcagatgagaacaacagatgaccgtgtctgcaggcagcacccagaactgatattcccctcaaacgtctaaatatattgttgagaaaattatctctaactgttctagtgggaatgtgggaatggaaaatatgcaacagccatggggccaggccctttgctgagcctgcaggttgggagtttgtgaatctattgaggcatcacaaatcttttctgatagcccctctgtgtctgtcagtt

SEQ ID NO: 11207 - DNA, 171 bp, Homo sapiens
atgtgggaatggaaaatatgcaacagccatggggccaggccctttgctgagcctgcaggttgggagtttgtgaatctattgaggcatcacaaatcttttctgatagcccctctgtgtctgtcagttccagtgtctcgccctgtcctcaccctcaggtctcctggggcccag

SEQ ID NO: 11208 - DNA, 186 bp, Homo sapiens
atgtgggaatggaaaatatgcaacagccatggggccaggccctttgctgagcctgcaggttgggagtttgtgaatctattgaggcatcacaaatcttttctgatagcccctctgtgtctgtcagttccagtgtctcgccctgtcctcaccctcaggtctcctggggcccaggctgcagtgggggac

SEQ ID NO: 11209 - protein, 42 aa, Homo sapiens
MWEWKICNSHGARPFAEPAGWEFVNLLRHHKSFLIAPLCLSV

SEQ ID NO: 11210 - protein, 57 aa, Homo sapiens
MWEWKICNSHGARPFAEPAGWEFVNLLRHHKSFLIAPLCLSVPVSRPVLTLRSPGAQ

SEQ ID NO: 11211 - protein, 62 aa, Homo sapiens
MWEWKICNSHGARPFAEPAGWEFVNLLRHHKSFLIAPLCLSVPVSRPVLTLRSPGAQAAVGD

SEQ ID NO: 11212 - protein, 9 aa, Homo sapiens
FAEPAGWEF

SEQ ID NO: 11213 - protein, 9 aa, Homo sapiens
AGWEFVNLL

SEQ ID NO: 11214 - protein, 9 aa, Homo sapiens
LIAPLCLSV

SEQ ID NO: 11215 - protein, 9 aa, Homo sapiens
LLRHHKSFL

SEQ ID NO: 11216 - protein, 9 aa, Homo sapiens
SVPVSRPVL

SEQ ID NO: 11217 - protein, 9 aa, Homo sapiens
AGWEFVNLL

SEQ ID NO: 11218 - protein, 9 aa, Homo sapiens
SFLIAPLCL

SEQ ID NO: 11219 - protein, 9 aa, Homo sapiens
FVNLLRHHK

SEQ ID NO: 11220 - protein, 9 aa, Homo sapiens
VSRPVLTLR

SEQ ID NO: 11221 - protein, 9 aa, Homo sapiens
LCLSVPVSR

SEQ ID NO: 11222 - protein, 9 aa, Homo sapiens
VSRPVLTLR

SEQ ID NO: 11223 - protein, 9 aa, Homo sapiens
SVPVSRPVL

SEQ ID NO: 11224 - protein, 9 aa, Homo sapiens
AEPAGWEFV

SEQ ID NO: 11225 - protein, 9 aa, Homo sapiens
NLLRHHKSF

SEQ ID NO: 11226 - protein, 9 aa, Homo sapiens
LLRHHKSFL

SEQ ID NO: 11227 - protein, 9 aa, Homo sapiens
SVPVSRPVL

SEQ ID NO: 11228 - protein, 9 aa, Homo sapiens
APLCLSVPV

SEQ ID NO: 11229 - protein, 9 aa, Homo sapiens
AGWEFVNLL

SEQ ID NO: 11230 - protein, 9 aa, Homo sapiens
LRHHKSFLI

SEQ ID NO: 11231 - protein, 9 aa, Homo sapiens
LRSPGAQAA

SEQ ID NO: 11232 - protein, 9 aa, Homo sapiens
SRPVLTLRS

SEQ ID NO: 11233 - protein, 9 aa, Homo sapiens
LRHHKSFLI

SEQ ID NO: 11234 - protein, 9 aa, Homo sapiens
SRPVLTLRS

SEQ ID NO: 11235 - protein, 9 aa, Homo sapiens
LRSPGAQAA

SEQ ID NO: 11236 - protein, 9 aa, Homo sapiens
LLRHHKSFL

SEQ ID NO: 11237 - protein, 9 aa, Homo sapiens
AGWEFVNLL

SEQ ID NO: 11238 - protein, 9 aa, Homo sapiens
ARPFAEPAG

SEQ ID NO: 11239 - protein, 9 aa, Homo sapiens
KICNSHGAR

SEQ ID NO: 11240 - protein, 9 aa, Homo sapiens
KSFLIAPLC

SEQ ID NO: 11241 - protein, 9 aa, Homo sapiens
WEFVNLLRH

SEQ ID NO: 11242 - protein, 9 aa, Homo sapiens
WEWKICNSH

SEQ ID NO: 11243 - protein, 9 aa, Homo sapiens
RPFAEPAGW

SEQ ID NO: 11244 - protein, 9 aa, Homo sapiens
SVPVSRPVL

SEQ ID NO: 11245 - protein, 9 aa, Homo sapiens
FVNLLRHHK

SEQ ID NO: 11246 - protein, 9 aa, Homo sapiens
RPFAEPAGW

SEQ ID NO: 11247 - protein, 9 aa, Homo sapiens
AEPAGWEFV

SEQ ID NO: 11248 - protein, 9 aa, Homo sapiens
AGWEFVNLL

SEQ ID NO: 11249 - protein, 9 aa, Homo sapiens
HKSFLIAPL

SEQ ID NO: 11250 - protein, 9 aa, Homo sapiens
APLCLSVPV

SEQ ID NO: 11251 - protein, 9 aa, Homo sapiens
AGWEFVNLL

SEQ ID NO: 11252 - protein, 9 aa, Homo sapiens
VPVSRPVLT

SEQ ID NO: 11253 - protein, 9 aa, Homo sapiens
EPAGWEFVN

SEQ ID NO: 11254 - protein, 9 aa, Homo sapiens
APLCLSVPV

SEQ ID NO: 11255 - protein, 9 aa, Homo sapiens
AGWEFVNLL

SEQ ID NO: 11256 - protein, 9 aa, Homo sapiens
VPVSRPVLT

SEQ ID NO: 11257 - protein, 9 aa, Homo sapiens
RPFAEPAGW

SEQ ID NO: 11258 - protein, 9 aa, Homo sapiens
APLCLSVPV

SEQ ID NO: 11259 - protein, 9 aa, Homo sapiens
APLCLSVPV

SEQ ID NO: 11260 - protein, 9 aa, Homo sapiens
AEPAGWEFV

SEQ ID NO: 11261 - protein, 9 aa, Homo sapiens
FAEPAGWEF

SEQ ID NO: 11262 - protein, 9 aa, Homo sapiens
RPFAEPAGW

SEQ ID NO: 11263 - protein, 9 aa, Homo sapiens
SFLIAPLCL

SEQ ID NO: 11264 - protein, 9 aa, Homo sapiens
SFLIAPLCL

SEQ ID NO: 11265 - protein, 9 aa, Homo sapiens
APLCLSVPV

SEQ ID NO: 11266 - protein, 9 aa, Homo sapiens
AGWEFVNLL

SEQ ID NO: 11267 - protein, 9 aa, Homo sapiens
HKSFLIAPL

SEQ ID NO: 11268 - protein, 9 aa, Homo sapiens
WKICNSHGA

SEQ ID NO: 11269 - protein, 9 aa, Homo sapiens
SVPVSRPVL

SEQ ID NO: 11270 - protein, 9 aa, Homo sapiens
AGWEFVNLL

SEQ ID NO: 11271 - protein, 9 aa, Homo sapiens
SFLIAPLCL

SEQ ID NO: 11272 - protein, 9 aa, Homo sapiens
AGWEFVNLL

SEQ ID NO: 11273 - protein, 9 aa, Homo sapiens
LLRHHKSFL

SEQ ID NO: 11274 - protein, 9 aa, Homo sapiens
SVPVSRPVL

SEQ ID NO: 11275 - protein, 9 aa, Homo sapiens
APLCLSVPV

SEQ ID NO: 11276 - protein, 9 aa, Homo sapiens
LSVPVSRPV

SEQ ID NO: 11277 - protein, 9 aa, Homo sapiens
LIAPLCLSV

SEQ ID NO: 11278 - protein, 9 aa, Homo sapiens
RSPGAQAAV

SEQ ID NO: 11279 - protein, 9 aa, Homo sapiens
AEPAGWEFV

SEQ ID NO: 11280 - protein, 9 aa, Homo sapiens
APLCLSVPV

SEQ ID NO: 11281 - protein, 9 aa, Homo sapiens
RPFAEPAGW

SEQ ID NO: 11282 - protein, 9 aa, Homo sapiens
VPVSRPVLT

SEQ ID NO: 11283 - protein, 9 aa, Homo sapiens
EPAGWEFVN

SEQ ID NO: 11284 - protein, 9 aa, Homo sapiens
RSPGAQAAV

SEQ ID NO: 11285 - protein, 9 aa, Homo sapiens
CNSHGARPF

SEQ ID NO: 11286 - protein, 9 aa, Homo sapiens
NLLRHHKSF

SEQ ID NO: 11287 - protein, 9 aa, Homo sapiens
LSVPVSRPV

SEQ ID NO: 11288 - DNA, 20 bp, Artificial Sequence
  forward CD20 primer
ttgggtctggagcacgttct

SEQ ID NO: 11289 - DNA, 23 bp, Artificial Sequence
  reverse CD20 primer
tgccttcttccaggaacttgtaa

SEQ ID NO: 11290 - protein, 8 aa, Artificial Sequence
  C-terminal FLAG epitope tag
DYKDDDDK
